United States Patent Application Publication US 2025/0051766 A1 - sequence listing, part 16

SEQ ID NO: 5065 - DNA, 58617616 bp, Homo sapiens (residues 30,394,323-32,565,345 of 58,617,616)
  source 1..58617616: mol_type = genomic DNA
aattgtgtgtgcaaatgggtagttaggtatctaactatgatagtgcatgtgtgggtatgtaattactagatttgcatttgcaaatgctcatttccctaaacagccctctccccactcccacttctcagctaccctcctaccccacaacacacacatacccaggtgtaggactgggccaggtgcatctcttacgtctgctcggctgcaccagaggaagctccttcttcagcgtcccttccccattctatgcaccaccatgccctccacactgagaggaagaaaccagtgacatggccctgtcttcttccatctctggtggtaattgtttgccccacctgtaaatagtacagtctggaaattacacatgagcagttgcttttctactcccagttcagcctcacctttccaagggagaatcaccatttatgaactggacttacacaatctagtgtgcaagtaagctgcacactgagctgagctcaagagaaaagttgaggtgacaccatggaggccttgatgaaggattttaggctttacctgaaaagcagtgggtaagccatcatgccatgtgaagggttgtttaaggggtcaaccccttaacactggttttggagcactggtttcggagtcttgcacatctgcttcccctttcagcttgtgagctcggttactcctgaaaataaatgtaatgtgtattcagggtttagtgtaatccttatttgcattaatgcatttgtgcttcatgtcattgtactgaatgaagttctagtcttcttagggctttcgttgtgtacaaagggacaatgcttagattaatcttaattgctaccaattttcatcttatctatggtacaagattaatgaaaagtgataaaagaaggaactgacaggacaggtagtttatgactctaaaatcagatagtctacaaacagacaaggtgtcattttgggtaccataaaggggatgtccaataactagaacatagaagtggcattttgttgttttgtttgcagtatctacagtcaaacacctaagacacacatctggtttggggtggaccagttgcagtttaacgttaaaacccagccctgctggtggatgtagaatgctggtctgaatgtgtcagagtgattggttaagaactgtgcctcctgcaggaagatgactcagggtcacccagaccttggtttatctgccaaagaagggccaccaggatgccttttctggggaggttccatatgttgcgcctaaatgtctcagtgattggattttagtggcatgttctcttctgacaacaagctttgcttctgccatgttgaaatgcaaccttaatagctgtgtacctcttcatgtggctgagtctgagaggcagcaaaagatctacctttctccataatttttgtttagtaaggactttttatcactttaatgcaagttaagctttgttttgaatataagacttatgataactaggtcagttacatttttgttttcattatgttttttaagttaataaacttgattttttaagagcagttttaggtttgcagcaaaattgagtgggaagtacaaaggctcatccccacaattcctcgctattaacatcccccactacatcagtacaattgttaccactgatgaactacattgacacgtcaatatcacccgaagtccatgtttacattagggtgcacttggcgtacattctgtgggttctgacaaatgtatcatgacatgtatccaccattgcagtatcatacagaatcttctccctgccctaaaactcctctctgctctgcctacttcattatgttgtaaaaaaaatgacttctcaccaaataacaaatgccagtcaccaaaaatcccagccttttatttaagcagagggttgattggtacctctctccatctcctgatgggataattttgcctgtagatgggaatttggaatggagaatctctttcaaataagagatcacatgatctgtgttctagagtctataaaataaccaattgaaaaggaagtgtccaacttgacttatattttctggatcaatttgactttctgggaatttggggtttacttttgcttttggcaatttctttagatttgtctcttccatccatctttctttgagaagcttgatgcagacctgccaattgttacagtgtagcagtttcagggaagagagtaaggaagtgattctaaggacaggaggagctttctacagatgtgtcctgcctccatttgctatgagagggctctctcttttttttttttttttttttgagacaaagtctctctctgtcgcccaggctggagtgccactgtagtggcatgatctcggctcactgcaacctctgccccgccgccaggttcaagtgattctcctgcctcagtctcccgagtagctgagattacaggcatgcaccaccatgcctggctaatttttgtatttttagtagagacggggtttcaccatgctggccaggctcgtctcgaactcctgacctcaggtgatctgcccgccttggcctcccaaagtgctgggattacaggcgtgaaccaccgtgcccagccaagcaggctctcttttaaagggcttcctgacctcaggccagctaggcacctccaccttcctgcaaacctcttcttacactccagctttttgctagagcccagagctcccagttggcccttccacatcctataactctatggctgcaaacctgggcacttaatacttgttagaacttgttacttcaggtcttggataatagaggctggggtgacaatggttgtggcttgagactcaggtgataggaaaagctgtacctgtccctgagtttgtgttcttaatctcatgattcgttaacagatggtgttcaatgtctaaagccacctttgcattataaatgggagaattttgctggaaagactctctctggcatgaggactctccacctagccctcatcttttgttcattttgtcaaacaaatctacatgtgttaaaattgcaaagaactaaatacacacaccacactcacagatgagtgcatgtgaaactggtgaagtctgggtaaagctggagggatgtatcaacgttagtttcctggctgtgatgccaaactatctatcattattcaggatattactattgggagaaactgggtgatgagtagacaagattcctcagttatttcttacaactgagtgtgaatctacaattatctcaagacaaaaagcttaaaaaaactcagcttttacttctttgttttatattgccatttccaccatactccttacagtttggtgttctgtggattctttactaatctgcctcgtttatttaaatgttaattggcgtctgttaatttgatttcagtactagaagccaaactcaacaataagaccccttaatgattacaaggtattagagcttggacaagggggtctgaaaagaccctcatccctacaagaaagtaaccagtgttcagaaataaataggcatgagagagatagaaggagagagagaaagagagaataccctaacagaaagaatgactgattggcaaatttaagagctcacaaaacagaccaggtctaggatgttagaaagtacaaacagaaaatagcccatgattttaaacattaattctttagtttctttttcccttttaaattttgaaataattatagattgataagaagttgcaaagatagtatggagaggtctttggttttccccattgcttgcatcttcgataactgtagtgctgcataatagcaaaagcaggaaaccaacatcactacaatgtacctggccacttctgtgtcatttgatcacgtctgtagattccgtaaccactgcctttattatgacacagaagtgctcttcaccacaagatctccctcatctacccatttccagttatatcccctccgtgccccaaccatccctagcccttggtgcctacccatctgtttaattttctcaatttgggaatgttgtataaatggaaccatatggtatatgacctttggcattggctttttctttttcttttttttttttaaattatagtttaagttatagggtacatgtgcagaatgtgcagttttgttacataggtatacacacgccatggtggtttgctgcacccatcaactcgtcacctgcatgagatatttctcctaatgctatccctcccctagcctcgcaatcccggacaggccccagtgtgtgatgttcccctccctgtgtccatgtgttctcattgttcagctcccacttatgagtgagaacatgcggtgtttggttttctgttcttctgttagtttgctgagaatgatggttttcagcttcatccatgtccctgcaaaggacatgatcatccatgtccctgcaaaggacatgaaattatccttttttatggctgcatagtattccatggtgtatatgtgccacattttctttatccagtctatcattgatgggcatttgggttggttccaagtctttgctattgtgaatagtgctgcaataaacatatgtgtgcatgtctctttatagtagaatgatttataatcctttgggtgtatatccagtagtgggattgctgggtcaaatgggatttctagttctagatccttgaggaatcgccacactgtcttccacaatgattgaactaatttacactcccaccaacagtgtaaaagcattcctatttctccacatgctctctaacgtgtgttgtttcctgactttttaatgattgccattctaactggcgtgagatggtatctcattgtggttttgatttgcatttctctgatgaccagtgatgatgagctttttttcatatgtttgtcagctgcataaatgtcttctttcgagaagtgtctgttcatatccttcacccactttttcatggggttgtttttttttcttgtaattttgtttaagttctttgtagattctgcctattagccctttgtcagatggatagattgcaaaaattttctcccattctgtaggttgcctgttcactctgatgatagtttcttttgctgtgcagaagctctttagtttaattagatcccatttgtcaattttggcttttgttgccattgcttttggtattttagacatgaagtctttgcccatgcttatgtcctgaatggtattgcctaggttttcttctaggatttttatggttttaggtcttaagtttaaatttttaatccatcttgagttaatttttgtataaggtataaggaaggagtccagtttcagttttctgcatatgtctagctagccagttttcccaacaccatttattaaataagaaatgttttttttttttttttttgagatggagttttgctctgtcacctagtcacccaggctggagtgcagtggtgtgatcttggcacactgcaatctccgcctcccgggttcaagcgattctcctgcctcagcctcccaagtagctgggattacaggcgcccaccaccatgcccagctcaattttgtatttgtggtagagacgggatttcaccatgttggttaggctggtcttgaactcctgacctcaagcagtccaccttcctaggcctcccaaactgctgggattacaggcgtgagccaccgcacccagccttggcattggctttttaaaattcagcataatgcccttgagcgccatctatgttttgcatgtattaagaattcattcctttatatttctgagtagcacctcatggcatagatgtaccacaattcatttcactattctcctattgtaggacttttttttttttccagaatttggctgttatagccaaaatttctgtgaacaatggcatacaggtttttgggtgaacgtaagtttatttttctaatataagggctcagaagtgcaattgttagatcgtatggtaagggtatgttttattttttattttttaagaaaatgtcaaagttttccagagtggctgtaccatcctacatttgtaccagcaatgcatgagagatcaggttgtttgcatcctcagcagcatttagtatcgtcattttgaacagaattttaactgttttaatcagtatgtagtgttatgttcctgaacatattttcatgtgtttatttgctattcatatctcttttttggtgaaatatctggccatgtcttttgcctgttttctaattatattatttattgagttgagttttgaggggttttgttttgttgttgagacaaggtctcactttgtcgcccaggctgcagtgcagtggtgctgtcatagctcattgcagccttcaactcctggcctcaagtgatcctcccacttcagcctcctaagtgagcagatgagactacaggtgtgagctaccatgcctggcctgagagttctttctacatattagatatgagtctttggtcagatacatggtttgcaaacattttcccctagtctgtagcttgtctttttatcttcttagcagggttttctgcagagcaaaaaatttaattttgacaaaatccaatttattaatttttccttttgtgaattttacttccggtatcatatttaagaaccatttgcccaggacctaggttcctatgatttttttcctatattatcttctaaaagtttcatagttttatgctttatatttacatttgtaatccatgttttgtgtaagatatgagatttaggtcaaggttctctttttgttgttgttgttgtttgtttatagatatccagttgttctagctccatttgctgcaaaaaactctccttccttcatggaattgcttttgcatccttgtcaaaaatcaattggccttacctgtgtggggggctacttctgagttgtccattctgttccattgatctatctattttttttcttttacgagatggagtctcactctgtcacctaggttggagctcactgtagcctggaattcctgggctccagctatcctcctgcttcagtctggtctacatatcttgatatttgagaataagaaagaaggacttcaagatccgggttagactccccatgtcccagtacctctggcctccaccaagaatggatgtgagcactggaactgggctcaccaccccagtggggtttgctctgcacaggagcacgtgtgaaggactttacccactgctttctctaccacattccccagacactactgttttgggtctcttttcatttcttttccttgcttacacatgttctcagattaaagtgggattttctgaaacagattttttctataatggggtaaaaaccgtaagtaaacagaattatcataaccatttaaatagtaataaaatatgtttttctatttctattcaaagagggggaaaggtaactggagaagatgaaaggaaaagctagatttgtgggtggtaggtgtgttttcttcttcttcaacaacaggtacagagttttagtaaaggacttcaagggaaaaggaaaaaaatagcatatactgttatggggttatttttatctttcatttttgtgacaacttatttgtacttaagagaatctttccaaagagttagaagcatcattaaataaagactgtgaaatgtgcaatatggcttatttatttaaatgttaattggtccaacgaacacttctaattagctctatatttgcttagcaaaaagttttacaaattccaattgtgaaaagcagctattttgagctggtaagcatgttgcagcctcagctatgatttttctatagttctcagcccttgaaggcacaatttaatttttcatgtatgcatactagcaacggtaaacacttgcgagtgtaaagaaccttctttaattagctgcacaacaattaaaggattcacaaactaaattgaaccctgtctcggtgcttactagctgaattctaccacctgtcacaacagcactttgttcaatctgttatgcaaaatcattatagcaatatagtggaggggaaaaaaaaagagaaaacagcaattatttcttacttttctcttgaatgggttattttgggttatactgatgtcaggttcattgaagctaaccttttgaaatctgtaacagcataatacttctaaggcagtctcagaatggctggaagaatattccattttacgcttttaggaggaagcagcattcatttctttcctcctaaaagtgctggagactctgatcatttgaaacaacctgttctacctctcccagccaccttccatttgccttttttcaccgggaaccctgtacggctcgacaggcttctgtgttttaaaagcttgcaaaccgcggccgacgtgggtttaaagatgcaattctcaaactgccgcctccagagcatctcgagtcatattacttcataagcccagtgacttactgtaaaaacatgtgtgttgcttgctttttaaacattttttaaaattaaaaaatatatatatatatatatatatatataattttcaaaaatttgatttaaactaaactgctctcctgtttagactgggtcggaggggaatgttacccccaccccaccctggccatttgcagagacaaaggctttattgtgaggcccaaacccaaagcctgacatgacagacttctccctggagtcaaggaataaatgtttacatttggtgttgccgtgccctggccccctggtaggaatgcctgcaactctgggctttcacatacagaagggatggggagggatgctttgcggaggagaacaccgctgctgacgagctgcactttgagatgctgcctggcattgcttaaaatggcatcaataacatattgttagtcccagcctccaaagcatatgtgatctggccatttcagacgtcggagtgactgtagacaaaccgctgagctcagtcagagggtctgcattctcccacattacaatattttttataagttgttctttacatcatttcaggaaaatgcacaacgcagacaaggcaggcctttgaaaatctaaactctttccctgaaaaaatgctgaaaggaggaaagtgagagccaaaggtcaaaggctgcgcaagaatgtgtttctctatttttcctatttcttaagcagaggaaactgtcatcgttgtggcatttgggtaagaaggactatctccaatcaggtccaggagggagaatttgaagtctacaggggcttctctcttctttctgctgaaatccaactctttggctggtccagggctagtgcatggaaactaaagtgagctgctatccgctttattgaagttggtgaaatgcatacctcctgcaaacttgcagctctagaaagaagacccacttgctgtcttccacagcctccctgtctgctgctgcactcggctgcagttttattgccagagtctccaagtgcaaggtccagctgctctttgtccctgggcatgctgtccccctcgttcttcctgtgctcttgacaacggtgtctgcaccaggcttttgatgggaggctgctgttgccttcagggatgggatggtcacatagtaggctctcagtgaacatctggtgatgaccgtaaatgtaatctccacttggccgaagaactcatgggaattgaagggtggattcaggcaatttaagcccttcagcattcccctctacatttttttctttcctttcctttcctcttttttttttttttttttttctgctgttcatttagaatctcctcatcacggtgcactatttgttccatcccacgtttcttattgctagtcttgcaagggaagatggtaggtagaagaactgtagcgtaaggccagcgttgcccacgcagggcctgcctaccttgtgctcagacctgggttgggcacaaagggggccatcctgccttcaagaggcttctagtctgggcgcagagcccagactccccaaggaaatgtggagacagccttggtgtagattctgtatttggggcaggccagagggggacactgttttctggcaccccagcatccctggaactccagcatcctcaactgcaggccacttgaggtagtgatggcttagcagtgaggcgcatggcatgtggagacaggcagtctggggttcagtcccagcaatctagtgatcagatgtgaaactttaggcaagttatttaacctctctgtgcctcagtttcctcaaccataaaacgaatatgatagtagtaaaactcactgatagagtttgagaattatgtgaaggcacttagaacaggactgagtgcccaggaagtaccacgttagttaccattgctgtttgtttctagaaaactctccaaccatgattttcctcttctcttatactacaaccacagtcatcaacacagaagaagacttctgtgaccaaatgtccggaggcgggggggctcctcaacacacccagcagtggacaccagctgggtgtccccaattcaattctgccaccatctacccagagatcccacaggttgcgagctcagtccccaagacggtcctgccccaggcaccagttgcaagtccaggcctcacgaacttctgaccaacaggcttcacgttggggttcccatgaccccctctttgggtcctattaatttgccggagcagctcatggaaacatttacttatgtttaccagtttattatcaacaatattacaaaggatgtgggtgaagagaggcgtaggggaatgtatggggcatggtggggagcttccacgccttccctgggcaccactgtccgggaacctcaaggcattcagctatcccgaagctcccagaacccagtcctcttgggtttttagggaagcttcatgatgtcatacatatccttcagaatatagggtgagaccctctttggggagggtcttaagaccccaagtcagaaagatgggggaagattagagtcctgccttggggcaggtgaaaggaggtcagaaaaagatcagaaatattctgtttcctgaggcctaatactgccaacattacaacaaaagactctgacagggaccatgggagttatgagccaggaactgcagacaaaacctatgtatatataataacaccgcactgctacttcctgaacttggggtctccctgtgcctgaactccataggttctgagattcaacagaaccttaggaaaccatctcctagctcctggcttcaggcttgatgggtctgatgagccatcagaccagagtcttccagggaaagcttctccatgggtaccaaaccatttaagactgcacttctcccttgcctcttgatactgtttatgggcgcagtgttgtagtctagaaggtggattttcagaaccggtgtgatcagtcgccacacccgaatcgttttccacctttgcatcctgcctactggaaattggattacttactgaagaatgtggaggcccttgatgcagaggcactgttaacatttttttttttttttgagatagagtctcactctgtatcccaggttggagtgcactggcacaatctccactcactgcaacctccacctcctgggttcaagcgattctcctgcctcagcctcccgagtagctgggattacaggcacccgccaacacacccagataatttttgtatttttcgtagagacgggatttaccatgttgtccaagctggtcttaaactcctgacctcaggagatccacccaccttggcctcccaaagtggtgggattacaggcgtgagccaccacgcccagccactgtttctatcttatcagacctgaaggatctctaaagtcaggagttcctgagtatcttccatgctagaagtatgtgcattgttccatgtgcagggcacatgggagagacacaatcattgttaacatatgaatttatagcctagcaggggcaccaagaaaagggaacaactagtcaaccgcgatgcatgcccagggagaaacaacccaaggaagaggagtgggagacgagagagcggagtgtggttaaggactaggaaaggatcaggagcaggtgccaccgagcaagaatcttaatttgccatggtcatgggttggggaaggttctgaaggtgttttctttgaaatccacaccgctttactccaggccaacagggattttggccaggagactgcaggctgatgtaggagagctctgctgttggggaaggatacattgtagggctataaatacctgagataggaaatgcgtatttttagctccaagcattgaggaaacttggattatctagcagtgattggggtcatctcccagctctgtttctacactgggaaactgtacggccagttttccttttaagggttgagcaacgtgccggggctggcacagcttggtgcctgacacagagtgacccctggagactgtctgtggaatgactgtgtgacagcctccagtgaacaagttttctgtagcgggtgtgctcctttaaagcaggggccaccacaacttgttggcatttccctgggtgttgctatcatgtcagtttctcatggtgataaccttttaaaagatgtttgatccctaaacagtgtagaaagagatgcgagcagaggagatccacagagtagacagagggcatccccaacctctgttgtctctgctttggaccctggactgactgcaatcatgtcgggtcccaccagttactttaatgaggggggattttgcttttgcagaagttgctgcctttcttgtgcctgttactttgctcacttattactggggtcacagcaggtggctggataaaggatcaccggaaccagggagccagccctacaactccactttgctcctccctgacctaccctgtcctgtgtggccaacagactgaccttatgatccccagaaggctgaaaaatctacaaaggatgtttcttcctttttgtttatattgacgttttgctagtttttctaaacattacataatgagctgatttcaaaatcagcttgctgtttcgagaaaactctccaaccatgattttcctcttctctcacactacaactatagtcatcaacatagaagaagacttctgtgaccaaatgtcagggtggggggctccccacacacccagcagtggacaccagctgggtgtcccccaattcaattctgccaccatctacccggagatcccacagggtgagagctcagtccccaagatggtcccgccccagacgacagtcacaagccggggcctcacgaacttctgaccaacaggcttcactttggggtttccaaaatcccctgtttgtgttctgagcagcaggaagggaatggacatccctgggtgatcaccaagatgagttctttgctgtctctcctttcaggcccttatgcatatatattctctctttttgttgttgtacataaagtggattatgcttgcataccattttgtgaacagccactgaatttaatgtattcttctgcacccttcttgatgagtgcaaaaacaattgcatgactctaccatgattgatttatttaatccagtcccgtgggtggaaatacagatggtttccaattttctttttctctcattagatctggggactgggctccttgtctttggctcacagaggatgactggggtttcctttgttgagaggaaagtggccgtcatgaaatcagttgggttttctctgatgtgatgggcactatgagtacctgccttggcccactcatcaccaaccctgaaggggtctcaggcatatacttttggattggaggtgggttatgagaaagatgggctgtgtttctttttgtgtgagtggatgcatgtacctgtgcacgagtacatgtgtgcacagaggtgtagaggaagttcaacctgttttttgctttgggtttgtggtgattgaatccaggccattatagaccatggggagaagggtggaaatctgggtgttgcattctagtaaaattggccactagtataattgccctaaccttctgagtgtctgctcacgggtgttaagcatttgtctgtaccatttttgattagtgcatggtatccaggggatgcccttgtgagccagcctcccctccccatcaccacctttgttccttgagcttctttccttcagtactccatctgcattatttgtccaggccacagccttttctccaggaattagaaagtcatcactgttttctactgccattcaatcttcttgacctctggtgagagttgtgagctgctctctctgccaatttcagcagctgggagggatattggtgagggcacaggaagtaagtggaagaagggtatcaaggtggtcacatcgcagttgcaatctgcttttgttttattcctttggttgttagtaattagttattcatccatccatatgtccatccatccatcagccatcattgatccatcggtccatctgtccatcatccatccatctatccttccatctattcatacatctatccttccatctattcatccatccattattctctatcatccatccatctatatattcatccatcctccatccatcgatcttctatccatccttcatctatcatcatccatctattcatctgtctattcatccattcatccatccactcatccattcatccatctatccacccacaaatccatcattcattcattcattcattatcatccattggtccatccatccatccatccatccatccatccactcattcatccatccatccactcatccatccatccatccatccacccacaaatccatcattaatccattatcatccattcgtctattcatccatccattgatccattcatccatctatccatatctttctatctaaacattcatctctggtatgtagaatggtgtctggcatagagtagttgctcaataaatatttgttgaataaatgaatgaataaataaataaaagtcagaggttttgaacttggagagtgtatttcctgccaatagtctgcagcaggcctatgagattcagaccaccttgttctgctaaaggacatctcaagcctcgctaatcttacagagctctcttttcttatgttgttatccttgggaggcgccctgtctaattttctccttccgaatccctggcccccctgctcccagcttccttggcagcagacaaggaagaagggcaatctaggtgtacttttataaatgacactttgatgaacatcatttcagctaaatctttgtacacgttcttaattatttccttaggtttaattgctagaagtggaattgccaggttaaagagaatgcacatttaaagatttgaatacctgttgccaaattgcccttcaggcatgttatgtcaaattacgtcccccgaccaccacaactgccatacaaattatgaccctgtccctttccttatattccttcaagtctgaatgttatttaacaaagtggtacaccgtactaattttatatgcaaactgtctcattttgctttttatttctcaagcttaatatgtatgtatatctatattttatgtagatatctctctatatagatgtaaagatacatatctttaatggaatgcctctaagtccctttggtgaattacctgtttatgccttctgtctggtttccttttgggtatttgaatttttttttttaactgtagcatctcttcatacatcagagatattaaccctttgtcttatacacatcttctaattgtttcttcgaagtatttcacttggaaaaatagttcgtacatggtgttttctaatgagataaagggatttaagtgattaaatcttttaatgtattcctttactttttagtgccatgctttgaaaatgatttcctaccccattaataatactcctaaattcaccttaagtatttatgattttattttaaatataaatttctaatccattaagtgcttattttgatgtatatccttagggtaaaattttgtattcacacattgcacacatattcataattttctattaaagagattttaaaattacattttccaactgatatataagatatataggaaaactccatttactttttgttctttgaaatttataaataaaataactttaaaaaattatttgaaataaataaacaatgaaaagtgaaggtctttttttttttttttttttttttttttgagacggagtctcgctctgtcgcccaggctggagtgcagtggcgcgatctcggctcactgcaagctccgcctcccgggttcacgccattctcctgcctcagcctcccgcgtagctgggactacaggcgcccgccaccacgcccggctaatttttttttgtgttttttagtagagacggggtttcaccgtgttagccaggatggtctcgatctcctgacctcgtgatccgcccgcctcggcctcccaaagtgctgggattacaggcgtgagccaccgcgcccggccaagtgaaggtctttttaaaatctctcaccttcacctcaatttcaccctcttctcaagaggtaataatttttcatggattggcattatctctgcacatgcacaaatgcatataaatacaaaggagttcttgtttttcacaaacatggcaaaaccgtatacacattgctttgacactagcatttatatacttaagaatatagagatctatttaattctcttaaacttggacaaaattccatgatatggatgtaccataactacttaggtattttccaatgggtcaatgattgaatcatttccattctttctccaattaaaaaaatgctgcaaaaaaatttctggcacatacacatgtgaatatttctataatatggatacctccaagtggcattgttaggttgaacggtatgcacatttaaaattttcgtggatattgaagaattgctttctaaacagggtgcaccagtttacttttctgcagatagtgtgtgagaatggtcagtttcccaaacctgtaccaacaatatatacaaataaagctttttagtttttttttgcaatctgatgcaccaaaattttaaaatttttatatgaatttcctttggaatatagttaaagatacatttttatttatacaactttatatggcttcattttaaaaagtctttaccaaggattataaaaaaattctcctatgatttcagtgatgacttcttagttttaaaactttttgtgtgaagtaatgttgtgtaatgtattttttaaatgcatagactattatctcaatatgtttactgatcagtctatttttatatctgaatcatcacctttatcaaaaccacgtgtcactttcgggcttctctctacctggttcattgacatatttgtctacttctgtatactaccacattatttcaattattatagttttactgtattttgatttgatagtacacatgctgtctttttattctttcttaaaacttgcttggcaattatcacattttttaatgatgaattttagatttcacttgataagtttgatagatgatcttattgataatttgacttggatttatagattaattttaaaaaaatttatgtatttatgatatcaccatttcatccatgaacatggtatagttctattcaggtcttattttatgcccttttgtaaagttttctgttttacttttatagattttgcccatgtcttattatatttattctgggtgtttgaaatttcctctgacaacttacaattgtttttttttatacaggaaagtgatcattttcagtatattgattttatctttgacattttactacgatttattagtactaacagtttcatactttattctttggatcttttaggtacagtcattttcaactgtgaataatgacagttttgcctagtccttgtaaataattacaactcataacttctttttttttccaaaaatttcacattgtttgtattgactaagacttccaggacagagtgtcttgttgctagctttaacagaaataattccaatgttttgccattaaacataatgtgtgatttggccatttatctttttataaatcaggaaggaatgttgaattttatcaagtgatcttgggatgttgttgatataatatgattattctcttgtaagatattaatatagtgaattagtagactttctattgttgaatgaatcttgaattattgggggtaaactctagttgttctttaataaattatgtgaatataccatatggttcatttcactaatattttatttgatatttatattgctgtttataaatgagattgccttatagcttctaatagaaagtagtagtaatagtagtaacagtaattcttgtccttccttttccccttctccttcttctcctctttctcctccctcccttctttctttttgtcttatatgctatatctagtagcactatcctagtctcagagaatgaaatgagaaactttctatcttttctgtgttccgagatggtttatatacagagacgatctgtttctttgaacttctggtaaactatgaacataaaagtgatgaggcttttttttaaaatgtaaatgttcgttatccttaaatttcttctatagttattcttttattcaagtatgttacttctcattgtcatatctgataatttttttagacaattcatttattttagtgtagattttcaaatttaatggtataaagttgttctgtattttatcattattttaaaatgtgttttgtatctgaatttttattcccttcctcaatcccatgttgtttgtgttttctctttttattctcatccatattgccacatttattttcttggtcttttcaaagaaactgtttttagttgtattgaatgagccttttgggggaaagggtgtggagcggttctatttaattagtgtctgctcttatttttatgaatcccttcttactttcatcaggtgtatttttattacccccctccctagtttatggaattgaaggctttgttcatttgttttcaattcttttcactttctattcattacattaaaggttataaagtctcatttgactaccctcttaaccacatcctagaatttttattcgtttgttttgctattgctttgtttttacttttaatttgaacaggtatttaataagatttataggttttggaactttattcaggtatttttgaatgctgtaatacatgtaacatttttgagatgttgcatggatgtttgtaaagaattcatattttctgttgggtatggggttctgtcattcttatttttaaacatttatttttaaagtctaatttcctatctgaggaaggcatgataaccttttccatgatgaatttgttagttttgcattacattacccgcttttgcattatgtattttatagctttgttgctaggtgcatagaagttcatcactatgattgctccttgaagttctttgatagactgtattctttcttgacataaaaattccctgtactggctgggcacggtggttcacgcctgtaatctcagcattttgggaggccgaggtgggcaaatcatgaggtcaggagttcgagaccagcctggctaacatggtgaaaccccctgtctctactaaaaatacaaaaaattagctaggcgtggcggcgggtgcctataatcccagctactcaggaggctgaggcaggagaatcacttgaatctgggaggtggaggttgcagtgagccgagatcatgccactgcactccaaccccgggcaacagtgagagactctgtctcaaaaaaaaaaaaaaaaaaaaagtttccctgtacctatttaatgttttggcctcaaattatattttatatgatactactatttcactacttacttttgttttattgatgttgctttgtatatatcttttccattcttaaattttcaacctttatgtgaaactggttctcacataaagaatataaaactggggaatggtgggcatatatttaacctaatccaatatttgaaattctttcttttttatacatgattttaacccattaacatttattaagtttactaatatgtttagtttttatttttgctatcgtttttatgttgtctgttaatcatggcatatgaagttttctctcttttattgcatggatgaaattttgtttcattttttttcttttctgatttaaaagtgtacacctggggtttggtcacataatgagaatgcttaatttctgacacattttaaatgtgtgtgtgtgtgcacatatgcattcagcatccatatcctcccttgaacaagacaaagccttatctgtcatccatcccagccccatgtcctttgcctttccttcatgtgaaaatgatctgtgattttaattccagacattgtaaaaaccattatgtactacccattatttgaacttaaatataaatataaactgacctttggtttacttattttatttcctctgttgtataaaacctttaatgatttcagagtgagtctgagtccttttttatctgaaaatgtgttattttatcttgcacttgatgctacatatagaattctaggtttaaaataacttcccccagccctttgaaaatattacctgactattttgaaatatccagtgttgtcattgagaagtctgatgacagtccaattctcattcctatgtgggtaagctgttgtcttcttcctcttctttttcttcttcttttcctcctcctcctccttcttcttcctgcttctgcttcccctcctcctcctgctctcttcctccttctccttcttcctccttctccttcttctcctcctcctccttttccttcttctcctccccctccccctgccccctgtctccctctccctccccctcctcctcttctccctccccctccccctcctcctcttctccctccccctcctcctcttctccctcccccttctcctcctcctgctcctcctcctccttcttcttcttcttcttcttctccttctccttcttcttcttcttcctcttcttcttcttcgtcctcttcctcttccttttccttcttccttcttctccttcttcttctcctccttctcttttttttccttctagcattgttttttccactttctttctggaggttggaggtctcttcttgatgtgacagtgtgtgaattcttttttccagaaattttcccatcagctgggggattctttcaaacgtaattctttttatttttctcagtctacagactgaaaaatcatcatgatcatcatcatcgtcatcgtcatcatcatcatcatcatctttttatttgtgggggacagagtcttgctctgtagcccgggctggagtgcagtggcatgatctcggctcactgcaagctcagcctcctgggttcacaccattctcctgcctcagcctcccaagtagctgggactacaggtgcccaccaccgtgcccggctaattttttgtatttttagtagagacagggtttcaccgtgttagccaggttggtctcgatctcctgacctcgtgatctgcctaccttggcctcccaaagtgctgggattataggcatgagccatcatgcccggcccatcatcatcatttttcaatccttagctcgcttgttctttctggaacttctacttgatgggtattagacactttggattgtatctgcatgtcttttcatttatctcctatactttccatttcattatttttgtactactttcacatgatctttcatgtcaggaatttggctgggaccatgtctattcagcttttagatcttcaacagggatttaaagaaaatatatgcaatcaaattgtgaatttccaacacttttttgtcttttccttctctgatggctctatttccaatcagtcctttctctctttatggttgcaatattatcctttttgtgaagatactagttagaattttttattaaattatctttgtcctctgaatttttttttttttttttttttggtacatcttggttcttctttgttgtgtttttagcttccttcacatttgtagtgagctattttgtcatttgtttttgtgaaaagaggagtagtggcttagtattggtgcctggcagatattcttctgtggttctctaggtctgttaccccatcaggctctccatggcatgggagggatgctcattggctcttactgtggagggttctgggactgtcagactcacgttaggatgtgcagtgtggggtgtgtgggcaggaaaataggcaggctgggactcacccacctcctccctgccctccccatcctccctgggaagagggcaggctttctctctggcactgggagactcaggtgctcaccttcctagtgggtggccctttcatctttttccccaccacgttgatgaggcaactttaaactctctcctgtgtctttccaggtccctgtcctcactctagaacatttttttggttaggtgattcatattcttagagtgttggataatacttggcacttggctttgaggatgatgcttccctctaccactgcactttccattttgagtttttgtggatcagctcattattttcaagttctttccccacagtgtatttgaggctgttctttggcctatgtctattgatctgatcccatctatattatttctttctttctttcttgagatggagtcttgctctgtcatccagactggagtgcagtgacacaatcttggctcactgcagcttctacctcctgggttcaaacaattctcctgccccagcctcctgaatagctgggattacaggtgcatgccaccacgccaggctaatttttgtattttttttttttttttttttttttttttagtagaaacagggtttcactatgttggccaggctggtcttgaactcctgacttcaggtgatccgcctgccttggcctcccaaagtgctgggattataagcatgagccactgtgcccggccctgatttcatttactttccatcctcaggaatatctcaacattcctggcatgccgatgacctgcttcttgtttatttagtgccattagggaattattctatgtgaaaaaaacatcttttatgccatttccagggatttgaggtggcagagaaggagggtgaatgtgtccagttttccatcttgatacaatccactgcaaatgttatttaaatttcgactttctgggttttaagatttaatggaattctctaaatacaaacataccattagaaaaaaaaggataaagttttcttatttccaatatttatagttcttatttaattttctttgctaattgcattagttagaacttccataacaatatttaagaattggggtgatggggcatctttgcatctttagtttgcttttaatttgatgaaaacgtctctagtgttttatcacaaggacatgttttgggggtcggaatttttgtttgtttttagacagggtcttgctctattgcccaggttggattgtagtggcacaatcattgctcactgcagccttgaactcctggaattaagtgatcctcccacctcagcctcccaaataggtgacatgtcactatgcccagcaatttttttttctattagtagagacaagctcttgctatgttgcctaggctcgtcttgaactcctgggctcaagcaatcctccccgcttggccttccttagtgttgggagtacaagtgtgagccaccatgcctggcttgggttgttttgatataagtatattttcatgatcttatttttgtattgccaagcattttttttttttaatcagaaacgaatacccaattttgctggaggatttttgatgtctatcaaaatgatcatgtagatttgttccctggcctattatgcttgatttttaaatcttgcatcatcatttttgacattgatggagcattcctggtgtcctgttctaaaatgaaggagacatctgtgacctactcactgtatagtttcttctcttctctggagaaggcagcctttcacaggtgaagtgcgttcagtcattcccaccgtgggtgcagcatggatgacaggaaattaacttaatgctctttgttttgttaaatctaaatgatagatgcttagtaattgttggttgaatttaacagaaatatttagacttctagggttttttgtaaaatttcaaatatctgaggagaaaaaaataaacttgtgcatccttcctcataagatgttaaatagcatctttactcacttcaattacatttttggaacacctacatgtgtactgggcattctgcctagggatctgcaaagatgggacagaggtggctcctctgaaggtggggttggccggggttggaagggtgtctatgatgatgtgcccgtctcaagaggtacccatttccttcatgccaccatcactaaaccttcacctctgggagtcattttcttccaaattatgcaattaagatacttgaattgttataatggttattattattttaaactcttatttacataattctggtgcagactagatatatggccagttaccaaaaattttcttttaaaaattaagtattaaagattggtctctgctaaatgaggatggattttcttttattttaattttcccttcagaaataactttatattttctgattagagaaacgatgcgtgtccatgaactaatttggaaaatacacaatagcattcagaagagtgttggtcctgccacccagaaataacattttgttattttttctttctttattttctatgcctatatattcttttctttttcagaattggtaccaaactgtagccatagctgtatctttcacttgaaatgttatcatgggcatgttcccatccactgaaacgtcttttgaaagcctgagttttaaggcagaacgctccttcatggctttgatgtaaccattcccttactcttgaacatttggggtgtctgagtgtttttctcactataaatagcatttccgtacagttttgtctttattgctgatagcattctaggtttgttctaggagtggaaaactgagtcatagtttataaatgtttttgagccttttgatctataatgccaaactgctttcagaaaaaatataccagttttcactccttccagtacttcctaagaatgccctttctctgtaaccagaagcatatgtcatcattacaaacacacacacatatgcgtgtgtatattcacgtgtgtgtatgtgtgcatggctaattttacaaacgataaatgttgcttcgctattttaaatcagattctacccaagacagataaaataaaggaaacgtgagttttgtataagatgagagctgaatgtgcaaatgggccagcagtgtgaggagcaggaggattggatggggtctgagaagaggcagcacgctccgtctcctgatgtgctcacatctggggaggctttggcgtgaggcttctctcaccatggctctccccatccaggcaggactcccaacacgtcctctgctccacggcatcctttccaggcacggagaagccatcagcaacccgggaagctcagtgaagaggaaaggcagcaaagcaggaggggacagagttcccatccgggtgctgcttctggaggctggaggagaggccagattgtggtggccggtcctgggatgagtcatgacccagtgcttgcaggagtcacaggcaggctgggcgctgggcagaaagggtgcagggcatctgcagggacccagcctgcatgtgacactcccagggatgtcacggggaactgcttgtgcgtggctgagaacagaatctggcttaactcttttaacaagttaatgtttgtgctcatgggccctgtgcacatttaagaattaattaaatcctttaaggaagccatttatgtttgagaccaaagaagatacttaggggccaaaatacccccaaagaagaaggcctgatcacatctcttatgtcttggaagaccccacaagaccaacttccttataccccgatccgcagtgcggtgtgtacaaatacctttaacccattctttccggaaagctcctggggaggcatattaaacctgagttattttcaatttcatctaaggtgtctctatccaatgcagtttcttcaaagtctgcaatgtgggattcaaaatctcttagcatcatcaaagtcttagaaaaatatattactaggaagtagagctgcttcttgtgtgttaattacaacaagcccggctgccgcgcagataatctctagcgtcagaagcatcagctcaggcaatatcaggaaaaacaaaatctttttacaaaagaaaatcctaaattctctttttttttgccctctgaggaaaaaaaaagtgtggttcattgtgaagttaaatcccatctatttagttgttcttataaagatttcactgatatttgaaatattcctctcttgaaagggaaaaacaaggtaggttttcaggatccagcctcagaattatggtgctattttcggagtctttatcttcagaggaaaagctgtgaatcgtccatttgggccaggttctgagtacaactagaactttagcctgcctgagacgaatgcttggtttgcatgtgtgtgttttttggtgggtttcaccgttcaccttcacttacacgctgaggttgaagttgtgcggcagacggggctcttctttcccgtggctttgagggaagtagggatctgttaccagctgtccctctgggacatctgtgctccctgaaagtagagcaggctcctaaccaagacagggtccttgggcttcggaggcagtgaaggtcagggataggtatgtagaggatccagcgtgcagagaagggagaagtcggtagattttaaaattacttttttttctttaatgaggaggaaaactccatcggttcccatttattcagaacttcttaagaagatcctaatctactgtggccttaagatccaagttggttaaaggaagagctgagtgacagcctgtcctgaccagggagaagcaagccattggtggtgcccagggcgacttcattttttttaaattttcttttttagagacagggtctcactctgtcactcaggctggagtgcagtggcacaatcagagctcactgtagcctcccagttcctggcctcctgggtagctgggattacaggcatgccaccacgcctggtaatttttaaattttttgtagagatgagagtctcaccatgttacccaagctgttctcaaatgcctggactcaagtgatcctcccacctcagcctcccaaagtactgggatttcgggcgtgagccactgtctctggcccggcaagttcagaagatacggagacccccgtgtaaaacaacctaagtcacagggtgagagatctacccttgtcacgctccctgggatctccaggagagaagccccttccagcccccagtgtgtctttaacaccttctacctctgccagcctccctctgtacacgagagcaggccccaggccagggccggctgcaggcagcagtattcagccagaatttaataacattgttctctttttatttatttttataattacctttaatttagagcaagtgatacaaatttccatttagggtaatgatatagtttccttttaaatgcattaaagtaaaaaatagtgaattaattaaaaaaatattagcaggggtacaaaaacatgggaaaaaatgtgaaggtagtttattgcagtacaactctatagcaaaaagcatcaggaaggtgatatgcgggtgcctgaaactgggagcacagatctgtaaggcccttttagactatttttattttatttattttctgaaacacgtgaggtgacccttagctactggagagtttaggattttaggaaacagggctctacagaaaacctcctgaagacaagacatattgacctaagaggtttaggatggattccaggcccaaggaagttgcatcagaaagatcccaagatagagtagcccctctcctctttagcattaatttttctagaaaggactaaagatatctccctaagtaagctaagaaccctactgcccaagaaaaaggttactagatgtcaagtaatattataatggatgctgaattttaccttttcctttctctgaattctcctgccacctccctgcaagagtatagcccatgggggtggcctactgtgttcttcctgctctcagtttgggtatcaggtcttgaccctcttcctttctagaggagacttgtccaggcttatctccacagttctcataacacctagcacatagaaggcatcatttgcccattccatctatccatccatccacacatctacccatccttctatccttctatttagcccttctctttctctctcttcctttcttcttttctctctctctccacctacccaaccatatagccatcgatccatgtatccatccaccacccacccatccctcccttcatctgcctatctacacattcatccatccatccatccaaccatccatccatccatccatccatccatccatgcgtctacccacccacccatccctcccttcatctgcctatctacacatccatccatccaactctccatccgttcaaccatccatccatccaaccaaacatccatccatccatccatccatcctcccacccacccatccctcccttcatctgctcatctacacatccatccatccatcctcccacccacccatccctcccttcatctgctcatctacacatccatccatccatgcatccatccatccatccatccatccatccaaccatccatccatccatctaaccatcttctatttagcccttctctttctctcccttactttcttcctttctcccttcctccacccgcccattcacatatccatccatccattcatccatctaccacccatctattcatctatgtatttacttcttcatccactaaataaatattttattaagaatattcagtattaaacaatagcaccaaaaatctgttgggtgcctccagcactcaggtatccaatagggatacagtaataatagaaggagacattgtcactgctgtcacagagtttatggctaatgagagacagaaatggaacaagtggctattctatgcccttaatgaatgaagaagtgaatgagtggattggtaaatcccttttctctgtcactgctgggcactgggacctgtggagtccaagaatgctggggtgaacaagcagttccatagatcagaggttgcacttgccaggccttcgccagctgggcttctggagtgagataacaggctctgcacagtctgctcaatgtgtccccagccgctgagggcctgcccagactgtgcgaagagcatgcaagggcagggctccctcccgggggcttcggcaggagcaaggctggcagtgacagcagctgtggcggggaacgggggcctgggagcggtcgctgcgaaggacgtcagggaggtgggggcaggtgggagggtggataagtagtaatatgatggggatttcagggggtcagacacaggcagtcccaggctccctgccagggtcaagcatggtgtcttgaaaaaaagacagggggcaagtttcccagggtctgggcagtgccctctgcacctacagtcccgggtgctttgctgggggcctgggctggccctgcttgctgtgagtatgcaagggcggccactctgaagctcagctgatgctggccaggggacactttgtttctgggccacaggacctggatgtagctcattttctttctctctgtaactctccacctgctctgggtgccctgtttctggttccagatacccttacacttcctgcactttccaaggcacacacacagtgggctgcaggggggtctggacttggagcaggagcactaggtgggtgcctggtcactctgggcttctgggctttataatgctcactgtgcaataaagaggaggccaggaatccctctctccagggcagggctgaccgagggagcacagggaatgaacctcaaacctgtgcaacatcaaacaccctggggctcccctgtcatggacagcagactggcttctttactgagcacaggtaacacagtctgctgagcacacagggatctgagtgtgggtaacaggggaatctctgggttctggggaggctgagagacattcctgggacagggacgtttggctgtagatcagagaagttacccaaggaggggatgaggaggggaggatggatgcaaaaaaaaataatagggtgtgcaaggctctctgctgagagggaacttattaaatccacacggccttctttccggaagactctggaacatcatgcctaacatagctaaaatcacttctccttgacacagacaaggaaagcactggggaaagacccattagtgggatttcagacccctgggcaaatggctaggaggcagctgggcagggtgagaaatgcatgcttggtgaccatggtggagtgcccattctgtccagggcacacaggagaaggtgctgcctgccaccttctgcttcccacccaacgcttctggaagagcccaagccaacgtatggctcaggatcccaggggtgtgcgtggagccttctgggcttaggatggtcaagatttaaatgagtttggtagaagaaaacaaagatggtgaggacacaaaggcataagaatgacacaatggactttggggactcaagggaaagagtaggaaaggggtgagggataaaagagtacacattgggtacagtgtacactgttctggtgatgggtgcaccaaaatctcacagttcacctctaaataacttatttatgttaccaaacgccacgtgttccccaaaaacatgttggaaaaaaaaaaacaaagatgggagtgccttagtgtgatcatgggcagggagaaggctggaagggcagaggagtaaccgagggccccagggggtgtctggaagggagggcatatttgtttatcagccaggactcctttcgtttccagtgattgaaaatttaacccaaaccaacttaaaccaccaggagacctgtattgactcatatcagtgcaaatatgtaaatggttcagcctcaggtgctgtttgatccaggggctcaaatgtcaccaagcatctgacgtctctcctccttcacctcctcagcactggccttgtccccagtgctgcataaccccactgccacccgcttagactcttcttggtagcaaaacagctgccacagctccagatcttactgagagtgtctgaaccatccttgtagctccctggcaagccctagttatcactctcgttggcctggaataggtcatatgatgatccttgaaccaattactgaggctggggcatggaacattctgaatggctcaaactgattttatagtcagaagcagggagctggctacatctcacccaagctgcaggactgagtaggaagaggggttctcccatgtagggactgtggtgggcatggatgcaaggatgtgagtgtccatgcaggcatctgtagttggctgtggagtctggacctgattaataggtgtgagcgagagtgcaggaagtcccagaccctactaggaaccctgagcatggagtgacattttcagggttcccctcccagcagagcagtggtgggtcggggctggtagcacaccccaactgggcatgactgtgggagcctccccagaggtggtctactttggcaggatctctgcaacccctgaggagctacaaacaggtaatgcttggcttccccaggcctgcattatgaaaagcttgagttacaaaatgctctggctattaaaaacctgctactgactttaacggcaataaaatatctgctgtttatgagtaattagccacttctggaaaagaactctattcctttaaatttatgaggtgccttgatttatgcatttcatggtggggggatgtcatgttacatcacatcaacctgatgtaatttgatgcaaatcaaacacatgaaggagtgcatggaaacgctctctcctgcctcctgaagtgtgtttttatatgggggaaggttttggtccttattccatctttgttcttcttgcttgctttatcaggaaagtcttaggtgaatctttaccctgaaggtccttggtcctgagtgcactggctgcagcctctgaccacccttcaggtgcttccaagggggacttcacatccccgagggtggcagagatgcaaatatctgaagctatttaatgagcacccacgccttgccctgggttgcaggagcctggggaggccaacagggagacgtgcttcctgattttaaggaccccagggttggttcctatacacaggacatgatgtaatcaatgagtctgatttcatattgtctgagaggtgagcgtggggcccggcagggggaaggtatattttggaagtctttcatagcttctgaacctctgtctgacagcttagagggtagaggtgagggcattcaataatttgttggtgggactatgtatctatttgtctgtgtgcattatttcttctttagtccacccactcatctatctatctgctcattgatccatgcatccatccatccatgtatccatccatccatccatccaacatccatctgacacctactaaatttcttgagtgaggtaacaaagaaaagtaagacacagatgcatatccactaacttgctgtggaaccataggtgagttatcccctaccatctggcctctgtttacctatctgtaaaatgggcacatcagaccaagtgtcaaggagctagatgatctcagatatttctcttgctctgccatcctctgtaccattgtccctttcctcaaggaacatctctgtgcaaggacagaaggtgtggacaactctcattcatgggatgcagagatgcttgccaagtagttgaggagaatgtggggaagagtgataggaagagagataaggtaggatgcagcagtggccctttggtggaagcttttggcatgaatctgggtagtttgccctcaggaaaaacaatgatttttgatctttgatctctgcacttaaatggagttatcccaagggtgcaggggacagcaagtggaaaaagcctggcattgggcatggagcaccacccctagtcaatgtgaacttgttggttggctgtagatgtatctcagccggttggctttcttggcaggatggctggatgggttttactagatttctcggggtcatgtagaaagcacacaccttggtcttctagcatgaggcccttttctgttccttttggtctcaggcatactagctttccagaatgcccagcatcctagcctggcttcctcaaagtgacagtcagtggtgttcaagcatcatgtgtaatgtctctgggctcctgactttagaagggaagttacagttgaaacaaggccacttgacctccttcccggttccaccttgggtgtgacatgagacgatggaggaagtttagggttctcacaaagtccaggttcaatctgtaatataattatttaaaaatggaaccttgctattgttttgatttgagtcttcttgctttctggttaggagtgacatttttgtggtcacgagccaaattttgttgcttttgtgaattccctgctcacatgccttttgtccaggtttctaatgggggtgtttgacttttccttgttaactgcaagtgctcttaaaaatacaaaaggtaaagttattaactccttgcctaccacgtatgcctctgaatgctggtcttccatgaggctttggaacaggtgactgtgagcaggactgagggtgattgcaggcctgatagaggccgcatcaacatgcagatggtgacaggggaaggaggaggagaggcaggagcagacgcaggctttgcagagcacctgccctgtgcagacgctgcttcaagtacttcctagcagtgacctcactcatcttcccaggtacattagcattgccaccgtagcacactcatagagctgacaagttgccccttgggactcagttcttttggagtaagatactgtacaccttcttgaagcagcagcgagttttcctctgttacccagagtcccagtaaagagattcctcataggagcccagagagtagcagtggccaccctgtggggaccacagtggctgctgaaggctgcttgcagcttgggtaggtgatacttccacaccaagctactgaagttacagaacaccttggggttctctgaaggcctctccataggacataacttctggcacctggaggtgggggtgggggaagatgttgatatcaagaccctggtgagatagtacagagtgtccaacatcagatggatggtgcactgagggtcctggaccagcccatgaatggcattttctcccttgtgcagagagaaacattaattgcttcattttagaatatttctctgtgttcagcatcagcaaagttcaactgcagatgggtgatggttcaagatcagggtttggctatgcggtccctccctgtcaggtgggcctcagaggcacccacagggggatagagagaggggctgagttcagggtccagcctgacccgcttccttgtctaacacatgggaagccatgattcagagaggggccagggcacctgaggccacatggctacctggatgaccatgcaggtgtggtttaagggggtggaggaggctatagagggaggatccaggcccactgatgtagtggtggggaggccgtttgtcttggatcctggccctggggctagctgggagaggaggtcagtgcacctgggctggggagaggagtcattaattcagtcagcacttcctgagcacacctgctagtgtgaggctctgctcttggcacttgggaatgttgccctggtggatgtgtcatcatcacagagaggatgccttagctgcccctgagggcatcctatttggttccagttggctgtcttcttcctgacactatgcaaggatctagatcttggggtgcagtgaactgagatcagggagagaggcagcagtagaggttcagaatggaggctgttgtctccaagaacaactctagggaagggagtggcagtgtcaccccgcatcgtcagctcaccccaaaggcctcctctgcaccaggcactaaggagacaaatgaacaagattgttgttctcaaaaaaactcccagtcacctgatcctttttcgagtgaacagtgctcaaatatttgcatcgtctctttgggtggatgtttcagatccatctgtcctttagatgatgagtttcaggagggcagggtgtttgagattctctctgcagagccaggcaccgtgcctggtgtgcagtggagagtcagaagggcttactgaataaatgaatgaatgagtatttgcatgagcaagtacgagaatgctgaaagtagctagggagtcaacaggagagtggagtttgaaaaaggcacgttgaaggacttggaatccaaattagttcaaccagaatttgtaggtacttgtcacctgcaaagcattgggtttcagtcacatgtgggccccaggaggtcctggataagggtacagggtggtgaggcacgggctgtgaaatccaccatgagacagagtggggttagctctttatggagggtgtgaagggtgggggaggggattgggagtggctgtgtggaagaactgttctcttctaagttttctggggtgacattaaagtaaagttctagtgaccaaacttctcacctggctgtgcctccatgagtagagggcagggctggtcatgttgtctgagtcttcctcccggcatccccgctttctccccaaggatagatgttatgctggaggcctgcaacttgttcattcattcatccattcattcatttgttccctcatttgattatttatttatttgcttgttcctctattcagtcactcagcaaatgttcatcaagtgcctcccctgtgcctggctctgtgttgggtgctgggggggaccctggtgaagccgatggtcacagtgtggccctcatggggttttggacaggcatacaaacaaacccaacctaatgtagaagacactgttcggggtgaggccaagataccgtggagatagacggaagggctctggaccgggacctgacatatcagggagggcttcctggaagaagtggtatttaatttctcccaagattactaggcacaggggcaaggagggattgcagagaggagttcccaacaggggaaatgatatgcataaaaggataccaagttgcccctctctgctccctgagaaaagggagtcctttctctttcacccaggctagagtgcagtggtgcaatctcagctcactgcaatctccacctccccagttcaagcgattctcctgcctcagcctcctgagtagctgggactacaggcatgcgccaccatgcctggataattttttgtattttcagtagaaatggggtttcaccatgctggccaggctggtctcaaactcctaatctcaagtgatccacctgccttggcctcccaaagagctgggattattggcatgagccacctcgcctgcccattgggagtcctttttcaaaacactaataggttgaagcaagatgaactggagggttatccattctcaagtcacactttactcccccttctttcctgatcacggttcgaaattggtctttgtccctggaatccatctatggcaggaacactcccatatctgagacagcagcccccagcagccctggttccatgagatgggccacctgcagccagctcccccagaacctgcgttgagggggtcagagtcagtcttccctcctctcccaggaggccagcccggcagaggctgggccagtctggtgacctgtgcaggagctagggatgctaaattggggacctcaagaccaaaaaggaccaagggcccagcccagccctggccagcctccatctgttagcctcagcgcagaaattgcaggcagcaggggacccgatggagtgcctggattttctccttagtaatgatcgtgcttacttaccggatgatgtgtatctgagcttatgtcttcgacaggtgcccctgtggacgaatctccctgggccgacttctataaatatttcaaaatcaagccccctttgatcactcttgcgtatgtgcattttacattatatttagttttgcaccgaatcaaatctgaggcctctgtgaaatgaaaataaactgttcgacacgatatcatagtccacaagtgctcaaatgtaaacggctttaatcaggggtaaaggagcagggaggtgtagcctgatgtctattccctggctgctgctgccccagggaggggtcctgcggaggccagggcctctggttcccagggcaggggctgtgcgctgaggctggtgccaggagccaaggcgggttaataggggattaaatgtctaacttcctgccatgaccaagtctgctttaaaaagggagcaagaaagccagcgagaggagagtaatcaatacactcctgacaactgctggtatctttttcagttttgcattattatgttaaagatataccattcattaaaagcatatatatatatatacacacacacatacacacacacacacacaggcacgcacagagagagagagtcagagagagagagagttcttgttgctttccttggtggggtggacacaattcagataaaaatccattacagagaattagggggctatctccttctcaaatcatcccatctgggtgaaatgggagccctgcttcatggcctagatgctggggtgtcagggctgagttgccattcccaaactgcagtccgtggatgtgacaccgtgggcaacgtcccctctccggcatggtgactgatcataagcttagaggaccagggggcttggaggactttccatagggtgggattctctatgagctgcagacaggaggctggtaacccacctactctcaccaagcttccattctgaggaagcaggatcacttccagcccgggtcaaatccaggaaggtttcctggagcacgtgaagccaggatgtagcatggaggatggagttgggctcacagctgtggtgaggtggggctgggctgctgggagatgtggggaaagtttctgcttctactttttcaccattaaaaagaaggcaaggggagacgaatgcctttttccaaaccctacactcttctttctcatgcacgcggagccctcatcaccacaagagctttgaccttccgatgtttggtttgtggtccaggagtttattttcatcctttactggtttaccatcttctctgactcacattggatagaacactgccttttctagctgcgcatagacagaaggtgtgtacagttttgaagctgttctcttgtaagttttctggagacaagactgtcacccctatagttggtggctgccctagtggaagctctgtggggctgactggatagtcttaggacctcagccgttggcgtcttttttataggaacctggtagaaggatggatgaggctctccctggcagtgtgaggcgtgcatgttatgttcttcctctgttaagagcttcttgagccgctgttttgcccaaatatgaactccattctgctcagattgactttcaagtctgcaccagcccatgcctctgccctatctcctctctgtcccctgagcattacaagctccatatacattttgtacatgctgatcccttgggcacatgtggcctacttctcctctctacctggtgacctcctcaaggctcggccaaggcctgtctccaccactgccttccttcccttctctctcctgcactcccatcccactgtgaccagcatgctgaagctctctgcaattcagcaggtgacccaagcttcatgagtccatccatcttccccccacttccccaattcagcttttaaaggcaagggtctggtcttgcttatagatctctagatgtacccatgtcttgccacatgtaggcattacaaaatgttatcaaaagatgccagtcccactatatagatcctctgataagactgacaacaggagcatttgtttgtttgtttgtttgtttgattttgagacagagttccgctcttgttgcccaggctggagtgcaatggcgcgatctcggttcaccacaacctccgcctcctaggttcaagcgattctcctgcttcagcctcccgagtagctgggattacaggcatgtgccaccacacctggctaattttgtgtttttagtagagatggggtaactccatgttggtcaggctggtctcagactcctgacctcaggtgatctgcctgccttggcctcccaaagtgctgggattacaggcgtgagccaccatgcctggccaacaggagcatttttattaaccacctttacatgccttggtcatatccttcccctctcagcatgtcctctgctaccaaattaagggggcttctggatctaaaaactatgctaactgctgcggtcagcatctaagaagcattactgcacaggtagaaaatgcctcatattctctcccacaaccccctgtgccctctcaaaatcccttgaagtgaataggacagcctatcagtctgttagagcgataaagaaactgaggctctggcaggggaccaaggtcacaccgattctagtgggagagcaggcaattggattcatgtcaatggaacttcaggtgtcattctctttccattactccagtctagttgggggaataagccacctgactctacaggagaatgtggaataatgtatcagcccttctatatattaagaaaatagaagagtctaaagataatttttagggggtgaccctctgctctaccagccagtgagtaacagacctgctacatttctccgtctgcagtgcctgccatgtctgccccacttgatttcactgcctggcctgtgtctttgtgcgtcttctgttccttggcctcctcagagcttgcccatggctgtggcttccttctttccaggcatttcccaaatgactgagctgggttccgactgtcgttatccagcccaacaagaataaatgtgttgcaaaaagccagcctggccactggcatgtcttcatgacttaactttctgagcccctatttcctcatcttttgtattggaataacatagcaccaatcatctaagattgtataaggctaacatgagacaatgactgtgatgtacctagcagtgttggcaggtggtattttgatggagaggaggaagatgatgaagatgaggatcctgttaatgtacatagtgatggtggtggccatgatagtgatgatggtggtgatattgatgataatgatgatgatggtggtggtgatgacgacgatgatgatggtgatggtgatgatggtggtgatggtggtgatggtaatgataatgatgatgatggtgataatgatgatgatggtgatggtagtgatgatgctgctgatgatggtgatgatgctgatgctgatgctgatgatggtgatgatggtgataatgatgatggtgatgatactggtgatgatgatcgtggtgatgatggtgatggtggtgatgcggatgctggtgatggtgatgatgatggtgctggtggtgatgatgatgctgatgatggtgataatgctggtgatgatgatgatcatgatggtgtgatgatgatggtgatggtgatgatgatgctgatgatgatggtgattatgatggtgatggtggtgatgctgatgatgctgctgctgatgatgatgctgatgatggtgatgatgatggtgatgatggtgatagtgatgatgatggtgataatggtggtaatgatggtgatgatgacggtgatgataatggtgatggtggtgatgctgatgctggtgatggtggtgatgatgatggtgatggtggtgatgctgatgctggtgatggtggtgatgatgatgatgatggtgtgatgatgatgctgttgatggtgatgatgctggtgatgctggtgatgatgttggtgaagatgatggtgatggtagtgatactgctgctgctgctgatgatgacgatggtgatgacagtgatcattatggtgatgatgatggtgatagtgatgatgatggtgataatggtggtaatgatggtgatggtgatgatggtgatgatgatggtgatgatggtgatgctcttgctgctgctgctgagggttgttgctttttaatgagaggacagtccatagtcttaacaactaccccatgtgaacttgtcttctttccatccccagcagctacttgcctggctttgtgtggtataggcagaaggtgacccagggatccagaccagaagtcttctctactcagagaagatgacaggagaacccctttgttgccatttttcttttccatctgatgttgttgtgctcattatctgtcttcatttctgggctgcagttttagcagagactccaaaagccacagtgatggaagctctttgcctttgagaatttttttttcaccaaacccaaaccaaaaatggtcacgtctttgagaattttgaagtcatccaaagtttccagggagaagacattcaaattcttttcccaaattctccaactcttgtcctaccagcatggaagctgcctggggctccatgggaccacatattaagccagcccagccaaatcctgctcactactcaagtcagtgagggccttgactttggccaatgttccatccccaaggggacacttgggaatttgactacagtctgcaacttgactctgttggttacacagttgtcattctccacagcctgatttgaatgtggtatttttgttcataaattcagcaaggatttaactatttctggccccatctcatggcactgtctacacatcagtcaaaatggaacaggtcacccgcgctgccctcctgttcatctattaatcatctggcaaataaaccactcagtatcctgcccaccccagtaatgtttgtgatgtaatttgtttggatgcccaaatgtcaccagtgttgattgtaagagatcaaaaaaaaaaaatgcacttgctcagcatagcaagctctaggccaaaatgtaagcatgaaatctctggtttatttttgtaataatgtttacagctgtttaatgaccctgaaaaggttcagtagtctgatgttctgtatttcagaacaggagtgtattatgcttataacaaccttagttaaacagtttgagctacaacaattggaaaaatagtatttaatacgaagccattgtattctaggtgaaattgtcttaattactgtttactgtcagcataagaaagcaaggtgggcttcagggacagactgagggtcacgtgagcctccaggaatggggtctgcctgttactagaagtgcatgttatgagaagattttgagtaaaatccacaatggtgtttggaaacccccttgctgtgaacccgagtcctagaccctgcagagtaacttggaggtcagggactcctacaaggcttccgaggtagcagtttcacccacgtcgatgaaaaagggaatatatttagttgtgcttggctagacaacaatacttgattttttaaaatccagtgcaaatggttattttgaaagcattttattttccaatgattctttttcgtggtataaggaaaaagctctttcatacaacttactggcaagatctatatttttttggactattcataagattacttttttttttctgtgctagcaaaatgaaactgtgtttttgtgtaaaatttatttagactcgtagcagctggcatctctggtgtcctgatagttttaaatttcattttgagtgaaagatacaattaggttctctattggaagagttaagtgaaaacttttgtcattgatatcacaggaaatagtcttgaaggcagaaatgcaaaatcaaaataaccattagcaccatcaaaggcagctgaatggctcacggtacctgcaatgatggcagtgatgagacagaatgtattttgataatctgtgcacccaatggtgggtttcatttgctgagtgtgaaattgcattgttcaagaagaaaacctgtaatgtttggaagccttcacccggggcccctgcctgtgtttagaggtgcagcacaggggtttccacactgtcgtgaagaatcctgtggccaccgagagcctagcttagttcttcatcaatactgactgtggagttgagtccccaaggtgccccaccatgaccctgtgctcagaaaaggtcaggactgggggggaatgttgccatgtttctacattggggggatgatgctgcaaactcaagagtttacagtggcctttaactgtccagcctcggtaaggacatctggctgcctttgcagagttaggtaaattatgcattcatttgttccttccatcaatcagccagggtttattgatcctcttccttataggtttcaggctggggcaatgaactgaaggccaggggcaagctgttctcactgtttagtagtttgtttgcttgcttttaattgtgctaagggtttttctgcccaggtgagctggttcgatgagttcttgcagaggttattcaaagtcctgactgcccagttgccttaagcccaggatcatggcctgccctctgctggcccctggcttccttttttaaaattttagactcgggggtacatgtgtatgtttgttaagttacatgggtatattgcataatgctggggattgggcttatagtgcacccatcaaccaaatagcaaacattgtaccctataggtaattttatcaaccctccctcccctctctccctccccacttttggagtccccagggtctattatctccatctttatgtccgtgtatacccattattgagattagctcaacatggattaaagacttaaacataagatgtgaaattataaaaaaaaatcctagaaacacctagaaaaacctcttctggacatcagtccaggtgaataatttgtgactccagctcctgggtcacgcagtgctgagtgaagggtcagtggggcgtgtaggctaaagtgctctggcagcagggttgggggtgggctgtggcaggaggcccctccagggatattccctatggggcctgtaagggagcagcatggtctgaaagggaaggctcactccctggtgggctgggaaaagggataataagaccttccagcaggtcttttatttgaaattttaaaaaattatcttttaaattatttttgttttttgagacaaggtctcattcccatcgcccaggctgaagtgcagtggtacggatcatagctcactgcagcctcgacttcccaaggctcaagtgatcctcccacctcagcctcccatgtagttgggactacaggcacgcatcaccatgcctggctaattattttatatttttagtagagatggggctttgccatgttgcttagggtgatctcaaactcctggggctcagcctcccaaagtgctgggattacaggtgtgagccgctgcgtctggtcccttccaacaggtcttatcgtttgcaggcagctccacttcctccagccccatgagctcttatgtctgcagctggattcaatcctttaacagtaggataaatgatgccttagtttcccagtgtaggcatttgtatacatttctagagggctatcaggtagggactccccacccttccctcaacacagacataattattgcacacacacgcacacacacacacacccttagacaccaaagctgcgatggtttatcttttccccagctttgcattcagcctcgaagggacctttcattgctccctgttacttgtggacactcactcacgctggccccttagatgaacaggccctcgagggcaggtacatggaaggtccctggcaaatattgactgaatggctaaggtaaggaataaacgcattctggatgggtgaagtgtcaaggctggagaaattggggccgacccaggttttgtgagtcccaggccgggcctggggccagcttgtcctgcctcggctgttttggcgcagagacagcacaccaattaccccatactctttccaggaactcgtgcttccctttcttgctctaagtcgagcagcaggcatcagttatgactgccccattgcagcggcctcggctgcacctgctcgaggaatcacagaggattctaagctgactgtcgtggtcctttctcccagtaaggctctgtgcaggcttctcccaggcttattcaagggctggggaccagtatcctggaagcatctcctagggagctggtcagctcctctgaaaccctggggtctcccatgggcagtgacggtcagttaagttctaaagggaaccattgctgtgtctcctagtattcagcaactgggccatcaggggtggtccaagcctggggtgataaccatggacacctagactgtgagagttaggggtgtggacagcttttcctttccttttgtttctttctttcttttctttttctttctttctttttttttttttttttttttgacagagtctcgctctgttgcccaggctggagtgcaatggcatgatctcagctcactggaacctccacttcccgggttccagtgattctcctgcctcagcctcccgagtagctgggattacaggcacccatcgccacacccagctaatttttgtatttttagtagagacgaagtttcaacatgttgttcaggctgatcgcgaactcctgacttcaagtgatccgcccacctcagtctcccaaagtgctgggattacaggcataagccaccatggccggccagaggtggctttctcttggtggtttctgaaccttcagcttctcagtggtagccagggacccttccaactctgtccgattcggatcgtaggtgctcatggacttgtgcgaaggctgaggttaggtcacatgactgattttaagggctctggacttgtgcaaaggccgaggttaggccacatcaagttgaggttagagtgagtctctattcactcattcatccattcacttaggacacactgaacctaagataagccagctctgccttaggacccaaggcttcatccttgaccaagacagacatatcctctgccttcacgggaatgaagtatgtctgtaaaaggaccaatgacaaaatgttgcccccatggcaaatgctatgtagaagaaagtaacatgttgggacagagaggggctggggtgtcagcctcagacagggtgggcacagagggcttttgtgagaaaggatgtgtgagctcagacccacaagaataagaacagagccaactatgaaagagccggggcagcatgcatgttctagaacattctatcctcagctgaggatctagcaaaggcatttaaagaccttaaagagattacaaatctttgttaactctggccaggatagatagatagatagatagatagatagatagatagatagatagatagatagatagatttgaaaaaaataaaagaattccatactcaaaccaaatctgaaaactctcacattccttatttgacgagttgagctgtcacttgcatagcatgaatggtggtggtgttgggggacatggtcttcaactccatgcccctcatccaagctgatttgcagtctcgccgcattgcacattcagccttctttccctcctgctgaattggcgtcagctcatcagcagcaacctgaaaatagcccgtcttcctggattcatgtcttctgagctggccaactgggcagcctttggaagtgggccagccctgttggccttggactttccaaacttccatggagctgttgggtggaattctgagcaatcctgtgtggcttcagggtcatgatccctgttggctcagaagaggagccagtgcagctgtatggggcttgaaggtggagagagggtgccagacagggccctggggccaccagtctctgcctggagcctccagcaacctctgtacactgtgcctgctcctccctgctggatagtgggtgtcatgagtcctggggctggtgggtcttgtccaccatcatgtctccagtggcaaggctagggactggcacatggaaggatctcggtaagtctgttgaatgaatgcagcaacctccatgggatattagcttttttctgaccaacctccaaaatgggcccgcgtattttaaaaaaatttgagtgtagactgcccccagaagcaaaaaggaaagatgacaagctggaagccttctcctatggcaagtgcccatgcacctttacgctttgcacagttgtgcatatctttcattcgtggacaaagttggcccagcaccaccactgtaatccctctgcctcctggaagtaaacattcatggctctttcttcccttcccttgcaagatagactcctcctgccaaggaagtcaggtctcccattggagaccctccatgccacgcagtctcctggcgggaggcccagcaagcagcagaccctgccgaggctgcctgtgcttcctccacagttgagctctgtccccataggtctccctggttaatcacttagcccagaaatcagtcccggctggggttaagcgcagctcctggaccacctggctgcccaacacatctaaacaatgggatgcaagaggagaggtgtgtgcaaagatgattccaatggcaggaaacaaatttggactccttcaggtgggagacatagctggaaatagaaggatcccaggcaggggttcattgccttgcaaagctgagctccccacgtgctccaatgtggaaggggctgtttcctctgccctccctggagccatctggctttagccattctgcacaggctgaagagggggcagagaggactattaaagacaattatgcagaccagctttgaacgatagtgtttaacaaacaactttgagttctaattttctgcaaaacacatactgcaggtacaatttgtactcattattgtatattgggaaagttattaaaaacactcaaacttggttgagacttcctatggcatcattcctggattttaatgggtttttatctagttctataaaagacctctttaaacccaatcaaagtccctgctttggatatcttgccattgaaggatgggaagagccccattataaggtatcggtgtttcctttgacccaaatttgaacaacttcaacaatctgctaagattccgtcaggagataatttatacttcttttgatgggcacagttaccaaatgataaaataacagtgtttcgtaacataagggttaaatcttaatctctgaggtttgcaaagccgctactcgcagtctccttaaaatttaatatacctcgttaatgcttccttgcaaacactgaaggatttttatgattataatcatgtgttacagcacctagtactgtttctaagcagcatactaatcagcttaatgagatattactgcactttttgttgactaaagcaaaatcccttttattattctaaagcctgtcctttactttattttttcccaaaacattatcttgttttattatgtaccagtaaatatcatgccattgagtgttttttgtttgttttttttttttttttggccaaatcataaaatgatctctttcatctcagactggtgaatgtactgaatatagtaaacggaaacagaagttccaagtgggtttatttggtcttacagggaaagtcattctgctctcaggcaaactttggacggaaccaacaggtacaggtgcgacaatggggcaacggagaaaaagtttcacacgtagacccttgatttgttattaggtgttgaaagtggtaaaacattaataatttaaaggtgaatgaataattgcagtctgtaaatagaaaatacaaggaagacgatctgtcgccaaaacaaattggaggagcaatgccatattgcataattggcatttaataattcatttttttattattgtttttgacaagaattccttagcatgattatgtgtaggtaaggcatgaaatggaaattccctgcccgccaatgctgttgattcatggcgccacagccgcacctggcacggatctgaactctgcctctcttttcagggatggaagaagcgagcctgtgccttggagtgtcttcggcggagccggaagctgagccccacctgagtggccccgtcctcaacggccagtatgccatgagtcagaagctgcaccagatcacctcccagctcagccatgccttccccgagctccatccccggcccaaccccgaggagaagccccccgcatccctggaggagaaggcccacgtgcccatgagcggccagcccatgggcagtcagatggcgctcctggccaaccagctgggccgggaggtggacaccagcctcaacgggagggtggacttgcagcagttcctcaacgggcagaacctgggcatcatgtcccagatgagcgacatcgaggacgacgcccgcaagaaccgcaagtacccgtgcccactctgcggcaagcgcttccgcttcaacagcatcctctccctgcacatgcgcacgcacacgggcgagaagcccttcaagtgcccgtactgcgaccacagggcggcgcagaaggggaacctcaagattcacctgcggacccacaagctgggcaacctgggcaaggggcgtgggcgtgtgcgcgaggagaaccgcctgctgcacgagctggaggagcgcgccatcctgcgggacaagcagctgaaaggcagcctgctgcagccccggccggacctgaagcccccgccgcacgcccagcaggccccgctggccgcctgcaccctggccctgcaggctaaccacagcgttcccgacgtggcccacccggtgccctcgcccaagcctgccagcgtgcaggaggacgcggtggccccggcggcgggcttccgctgtaccttctgcaagggcaagttcaagaagcgcgaggagctggaccgccacatccgcatcttgcacaagccctacaagtgcacgttgtgcgacttcgcggcttcgcaggaggaggagctcatcagccacgtggagaaggcacacatcacggccgagtcggcccagggccagggccccaacggcggtggcgagcagtcggccaacgagttccgctgcgaggtgtgcggtcaggtgttcagccaggcgtggttcctcaagggtcacatgcgcaagcacaaagactcctttgagcactgctgccagatctgcggccggcgcttcaaggagccctggttcctcaagaaccacatgaaggtccacctcaacaagctgtcggtgaagaacaagtcccccagcgaccccgaggtgcctgtgcccatgggcggcatgtcccaggaggcccacgccaacctgtactccaggtacctctcctgcctgcagagtggcttcatgaccccggacaaagccggcctgagcgagcccagccagctctatggcaagggcgagctgcccatgaaggagaaggaagcgctggggaagctgctgtctcccatctccagcatggcccacggcgtcccggagggggacaagcactccctcctgggatgcctcaatctcgtgccgccgctgaaatccagctgcatcgagcggctgcaggcggctgccaaggctgcggagatggaccccgtgaacagctaccaggcttggcagctcatggccaggggcatggccatggaacatggcttcttgtctaaagagcatccgctgcagcgcaaccacgaagacactttggcaaacgccggggttctgtttgataaggagaagcgggagtacgtgttagtgggagcagatggctccaagcagaaaatgcctgctgatttggttcacagcactaaagtgggcagccagagagacctgccaagtaagctcgaccctttagaaagcagtcgggattttttgtcacacgggctgaaccagactctcgagtataacctgcagggtcctgggaacatgaaggagaagcccaccgagtgccccgactgcggccgggtgttccgcacttaccaccaggtggtcgtgcactcccgtgtccacaagcgggaccgcaagggcgaggaggatgggctgcacgtgggcctggatgagcggcgtggctcgggcagtgaccaggagtcccagtcggtgagccgctccaccacgccgggctcctctaacgtcaccgaggagagcggggtcggaggcggcctctcccagaccgggagtgcccaggaggacagcccgcacccctcctcgccatcctcctcaggtaggttagctgagaagcggggagaagcagcttgtacagcagccctgctcagggctgcctggttctgctcccaggcctccagtcagttccaaggccagtgggtcttgattgaggacaggggtgggttggacactgggccatgcctttctttccccccctgactggagggaaagggccgtcctttcacctcttaggccttcccttgaacactggctaccaagaaagtaagttgaggccgggtgtggtggctcacgcctgtaatcccagcactttgggcgcccgaggccggtggatcacttgaggccagggattcgaggccagcctggccaacatggagaaaccccatctctactaaaaatccaaaaatttaggcaaatgtggtgatgcatgcctgtaatcctagctattcgggaggctaaggcaggagaatcgcttgagcccgggagggggaggctgcagtgagccaagatcacaccactgcactccagcctgagcgacagagtgagacactgtctcaaaaaaaaaaaaaaaaaaaaaaaaaagaaagaaagaaagaaagaaaaaagaaagttgtgcgggagatggccaggtggtacatttttcagtgggcataatctacctttttcttgcaattgtccaaccccatttcaccgcctgacgctgtcggccatcatctggtctctggaactcaggagctggcattctgctctatccctgggtatgaatgtgtaagttccaaacttcaccatctttctctcccccttagcgtattcccataattctctcatgcaggcaccgcagtctccctccccaagccaaacctatcttctggccccttccaaaattacaacgtggctcacctgccagatccgtgtgacctaaagagccccaccactttcctctgatggtttggaaaagtacaggcatttgaaacacagacgcatgactgttctgtcttaaattgtactgtgttacacggctgatacagctttggggtctaaaatagcaaagcagaaaatctgtcatcaaaatgtctgtgaaattatgaagcttcctggcccagtttaaaaaaaaaaccaaaacaacaacaacaacaacaacaacaacaaaacacgctagcctcagacggctaaattaaaatcaccacctaacagcaggtaaggcgttgccttcatccatatttccaaagccccttactaatggatagtaaattgaaagttatctctagccctttataaagaaagcacctcgctaatactgtaatcattctgcagcctaacaacagaggaaatcatgccataacaaataccctgttactaatggcaacattgatttctgcaatcagccattaagtctagaaaatgaaagacagtttgaggcacctcgaggcactgccttgcccactgttaaagacgtagcagcaccctgttgagggtcattttttaaaagttttttcttctttcttgatcccccccaccctcactctttggtttagatacctatttcgatcttggaggcaattcactgctgcacttattaagtagatgccagttttagctttgctgttatagtcttgcttaagcatactcttcttctaggacaaaattagtattaaaataaagtgggactctgccggcttattacaaaccagtaaagaattgttaagacacataaatctggtctgcacattccagagattccgatagcacttaatgccgctgcttaaatacccatgaaacacactgtctactcctggagtcctagacttgtttgggatttattacggatgagacacttaggaagtgtctaaccagcagcatgagtgccaaggaggcgtgaggtcacactacctggagcgactgtcacatggaacatactaagattcgagggaagggttttcaccatgtaaagatagatccctacttgagaggcagccaagtgccaggtgtcccaatgtcaggaggagctctttctggcctcctaggatgaggtctgctcttctggcatgtgtcgtttctgattctggattaggacctttacaggacagggtgcagacagcaaactggttcccctaagtttttagagtgacatggagttaacattgacagatttccatccctctctcagacctcctgaaatgtaagggtctcggcagaatattctgacaccaaatgttcagcttcattaatgacgtgtttaccgtgtttttctcaccttctggccaagtgatagcctcatgctattcctatctctgttgcttgcctatctctcagtgcttggttgaaaaaacccattttgcttaaaaagaaccaaccgtgctcatgactcaaaagagaattatacttgagttgtggttatcttctcacttttatttcccctcattgaagtattttacaattgtgaatactgattctttcatttctggttgacttctttgttttcttcatattcaaattagaccctttcataattttctgactaagtaggagaattgagggcataccaatatacaacccgaatcagctgtgcgtctggggcattcaggtttccctgggatttaggactcttaaccaaatctggttagtcctccctcttatttccaacaagtttgacttgtatagaagtgcgattaaaataagcatttaaataaaaatctggatacaatgggtattttattattacctgttaaagagaaacctgcaaggtgaaggagagagagagaaaaaatctttaagcccttaagtaaagaaagaagtacttattaaggcttctattaagaaataactgcaaaacacggttttacaaatttctcagactgcataacaatgtcgcaaaacttaatttgcatcacttgattcttttttttgttgaaaactgggtcagtagggcctgagaaactattttttcagatcttaaccaatgaattcttctttataaatcgctgctcttaacatgatagtagttctgaattcatcataaaaaacctttttacagagcctcttagaacagatctctagaagaaggcttacaatgagtggcagagacgtcctttgttatctgatgtaattctttgcaaagaaggattgggaacggagtggctgtttaaaaatgtcttgctcagaccgagatgaagaaggggtcaagtttgcaatcaaacagttattgccgagatgggcgactgtcactggctaggctaatgtgggatgcagctgtttgttatgtgagcaaaagaatgtttgaatcagtgaacatgtgaaaatgattccagtgaaccagaaaatgtgtttgttctttggctctccaaactgctgagaaccaagcttaagatcaactgcgaaaactaggacctctgacaaattgagaggtcatattttctaacagaaaatggacaaaactagtcacacagatcacttccccatcttccccctttgttttatttttgttttgttgttgtttatttgacttaccagtaatttcacaccgtggtcaatgtcattcaatgtagcctccgtgtacaatgcaaagagaaactgtttggaaagcagcagcttattaattttacttttatggcatttagaaagcggggtggctgtttcgatgcctcctcatttctggcttgcatgcaaacactcttatggcattaatctttgcatctttctctaaaacctcctctagggctgagctcgaatcctcgctttgctctgagtcagaacacaaccaaagttctgtttcttcagattttgctttggaaatcacactcagaataattaaaacttaatgtactaagaaatgatactgttcattatatccaacagggcagttaccttctgaattccacataattttggagtggggataattgaagtgttgatggtgggaagggggtaattgaatgcattgaccctctgttcattaaataaagtcggctaagttacaggatcaatggaaagccagggagagatgcgaagatgaaaatatcgttaacccctactacttctggtataatattttgagatggacaaggattatttggtcagctgggctaaaagccttgcgaggtcttcttttgttgttagagctgcattcctgaaatgctgggtctccatcccattgaccacagcatcaaaggcctttatctggggcgctttcgcatttacatggggtgtatagtgatatgatagattttctttcttttccacctctttttctcatgtggctccccctccctgcccccgttcacgataaccggtgcctgctccacacacaaacaaatccaggcacccaaaagaagaaaaagaaaaagaaaaagaaaaaaaatttgagtttgaggattaagatcttcatttttttttttttttttgcttgtgcattccaattgttcttaaaatatttggcaatgtcaattagtaactgagcagagttagctgatgaacacaattttccagtagactgagcaccctattgttgccgagcgaacagcagatttctgaggtcattatcattcgctggttgcttggcccagctgcttcctgctgcaaaagccaaactttataccggagctcggggaggctgcagcaacagggggctggagggggggagaggggagctggctgcagagccgaagacagtcattatcagcagaggaaacagaaagtaaaagtttccaggcaattccaggaaaactgccggagcaggcttcttcctcctgttccagtccaaccaccttccacctctaggcagggaattaaaaaggacttggggagacccccctgggcatggtggcagctaatctctttgtggaggagaactttggaaaacaataatcccatttataaataatgcttaaaaatttttttagcccaggctcaagcatgtgagtgatgccctcttagatagcctccttcattgttatatatttaaaaaatcattttaaaaatgatattaggaacttgaaattagtcaatttggggatgacaaataggcaacattatttaattttccagagggaccttatgaacagatcatagtctgagattccttttaaaatcacatttagccttaaaggttccccctacgcctccccctgtcccctgcttccttatttttctgcccccagcccaccccaactccagccttccttccccacctcctaatttgggaactggttcagtgagatgaaaagctgcactttttttaaagctcagctgtgaaagccgagcgccatatgcagcccttcggtctctgccgtggaagcgtgtgcaggcggccgccgtgtttgcggagatttacggaggatcggctcgtgtgtgccgaagctgtgcccaggcggacgccggccaaggcccgtcccctgagctgagagccgagagctgaggtggccgcccgcctaggcgaataagccggctggtcaggtggctcctggggaatgtcagatggggcacagggtcagaggcccccgtgtcttcccctggcggccacctttccgctggggcccaagggtggtctgtccacttgggacgccctgctcgtgccgggatcgccgttgctctcagatgctggttcatgtgcggctgtcacatcatcctcctccttccccggagccggatgcctaccagcagtttctttttataaacttcccattcacttggtagacttgtatcatctcgtgcttaggagcgatgatttgggaacaatcagtaacacttcggggcttttaccatctttctgacccctttacatggagccataaatcccgcttctccggggctgcttgatgccagtccaccgtcacttggcatttcagaaagagggtacttgcacaggctctgaaagtcttcagactaggagtgtaacatcagagatgtgtggcataaaattgcagaggcagagcaccctctctgctccagcacttaacaggcaggacatggttttgcttgtgagggattagattcgaggccgcggagtcactcaaatgtgtttctctggcggcctcacttggcccatctgtgggatggacaccgctgttgcctgggctgcccttctgtttccaacactcctgcccacggagcttctgaggagctccatgaagctctcctccctatgcatgttagcgcaagggacggaacagttcatttaaacctaaatttaatggaaataaggaaaacatagattagctaaggacaggttacaatgaggcaaggaattaagcggtcaattttcaaaacagagcttgaagcattagctgcgtgatttccattgactcgaatgggaggttccaggctcaggtcttgaccaccaccttgggtgtgttggggtgggagttagtaatttgctttgcagacagccacaaggtgtcccttgattgatggtttggccagaagcaggtatcacgagcttccaggatctgactcttacccactcccatgcttaccatgcactcaggtagctgggaaatgatgcccactgtgttatgtgagccctgccaggggccacttctgcagagctggggcagcctctgcatagagggcagattggggtccttctggccgcccagatcccttcactgccaggttgcttatctttctaattctttctctggtttgaagctttgtgtcctgttcataggaagtgcgttcccaggaagggtaaggtaagactttcttcctctacatctcagtgcatttcccacgtctgccccttctccctgagaagtttctggcaggtagccctgatgtctcaaaggggtggggacagggctggcttcaacaaggcctgttatactggcctcgatattccactggttctagagagagaccgtgggtatacttggagacctagagatggagacagtgaatttcatgggaaagaactgtgcagggagcatttggaagccttttgagcctgggaagtcaggggagtgagtagttaactcctttacccgtagagctgttttggagcattgatggcaggggtggagaaacacctgcagagatcaggagattggatttgtgcacacttcccaaatccgtgatgattggactggaacctttgccatctgtgacccttgggcctgtttgctgcccttctgggtgtctcacctcccttcgtcttcctctcctctgtcggcatctgatgggtgcatctctccacccttgttgatggtgctggcatgtggaggaaggaggcgggggctgagcgaggcttgcaaatgcagaggaaaggggctctccaagaggggtgcatggtgtcgggggggtgggcaggtggtggggggactctgatctccccaggaagtgagctttgctgcagctgagagcggccatgggtcccccttgtcttttgctggcaggatggggcgatggcaacatttacttaagctgtggagtctggcactgccgcagccaggcgccatctggaaagcccttttcagaaagctgtgtcccccccacccccaaaaggaacttaggggaacaggacttgggcagagctgtgggacttgtttcttgggcagaacctgctcactgaggcacctgagccgggctgggtttccctgggagccaggtagataagacaggtctacctcggggtgcatgtgggctctttgctgtctgtggggccctcggttcatcctcgagccaggtctggtttaggtttactagggctgtattttccatctatttgttttgtgttgcattttgcttactctcttcacctaagtccttgtatattgtgagtatgatggggtggcgccagccgggattggtcagtgactgttccttccctgtaatagcagggctgattagcagaatataagaaatgaatgctgtgcctctgaaatgtgcctgtgagacaggatctagaactcagcggctcagcttgcaacaaacagggcaaactaagcacagagatttgctaccatcctttccctgagccacatcttcaaaaaagactgcagagtcccaaaacaatgcgtgtctgaacaaacaccatcttcagctacctgatgggtgggcctgggcaaaacgggggccatgccgaaagcaagggcagcagtccaggcagaattcatttgcctcctgtttccaccacccccaagagaaagttgtccagggcttagcttcttgtgggacccatctctttgttgctgtgagccttggggtttttgtgtgacatgtggcatgtgtctgggagaagcgagaggcacagcacaagctgactccttggcttggctgcccaccacaccacatgggaggccggccctccccttaacggtgcccagccaggaggctgcctccaatgtgggcatgaggacgggcttggctttaacacctcctcacttgcttccaaaggacagggtcattttccagcttttcttgcaagcagtgtctacctttaggaacctttcagttttactctgtgccatggggcccagggcatttcacggagaaatcagtcctttcctttacagaggcaacttgtaggactagacttttggccaacgctagtttcttttcttttgtctgacctcagttccaaaaccatttgatgcacgatgaaacaggatcgcgccacagtgctctcttctcttcattaaagtaatgtccagaaactcttagcacagtggtggtcatcgtggcttttggacactctcagttgtcctcaatcatcttgagaggcattctggaacatgttcaacatgttaacgttgagttcaacatgaagtgtatgcagtggtggttttcttgaagatcaagacagatacatgcttctctttattgctaaatatgtatatttttaaatttgttgctaaaatatgtgtttttattttcgtttcatttcattttttaaaaactcagtagtttgccctgaaaaattggagtgatcctgcagcaaagctgctatgtggcatcataatccctgttgagagagaaggcttggcagtgttcatgtccgtctctggctggggccagacccctcggaaatgtcctttttagtgaccttcaaaacctttccacttgggaccgggtgtggtggctcactcctgtaatcccagcactttgggaggccgaggcaggtggatcacatgaggtcaggagttcgagaccagcctggccaacatggcaaaaccttgtctctactaaaaatgcaaaaattaaccgggcttggttgtgggcgcctgtaatcccagctactcgggaggctgaggcaggagaatcgcttgaatccgggaggaggaggttgcggtgagccgagatcaagccattgcactccagcctgggcaacaagagcaaaactccatctcaaaaacaaacaaacaaacaaacaaacaaacaaacaaagtttctacttggtctcgtccacgagtcccgttcactgactttatgatgctgttgttgttcaatgacttcactattctttttttcttactataaagtaattcttgttcatcttggacatttaagagatacagataaataaaaaataaaaaaaattaaatgtgtatgcctaccaccactcaggaataatcactgtgaacactttttttttcactaaactagtaaatattttgttatcgatgcatagtttatgtatagattttagggtacctgtgctaatttgatacattcatataatgtgtaaagatcgaatcagggtaattgggaccttcatcaccttaaatatttatcttggctggatccagtggctcatgcctgtattccaacactttgggaggccgaggtgggcagatcacttgaacccagcagtttgagaccagcctgggcaatatagcgaaaccctgtctctacaaaaaatacaaaaattagccagagcggtggcatatgcctgtagtcccagctacttgggagggtgaggtgagaagatcgcttacgcccaagaggcagaggttgcagtgagatgagattgtgtcactgcactccagcctgggcaacagagcaagaccctgtctcaaaaagtattatcttttctctattctagaaacatttgaattattctcttttggctattttgaaatgtacaatagattattgttaactctcgtcaccctactgatctatcaaactcgaggtgaacatttttaattcatacttttccagtcctttttatgcaactaaaaatgtagttagccaaaaagtacatacttctgtgtaagttcttactgaaatgtatgtcatattttttcttgtcattgaacatttcccaccaggatcagcaaagttttcctgtaaagaaccagctaatgagtattttcggctttgggggccatgtggtttctgtagtaaacactcaattctttcataaataagagtgtgatggtatttcaataaaactttattgaaattgcaaaaattggcaatggttcagatttggaccctgggctgttgcttgcagattcctgtcctaatagtaatagttatacttttttttccccaagctttacacaagtaatatgcacatggaggaaatgctagaaagatggagaatccaagaaaaactctatatctataaaatggtttagccaatctctgattcgtgaacacgggacttgtttcttttcttttttttttttttttttttgcctgagatgcaacctctgaggtgtacgtttctgcagcatttgtgacctcatcgatcattctgatcttctgcaccattatttccttaggtgtgttgcctcgcagtagactctctggtcacaggctggtgagtccgaggtggcagagctaaaccacccactgtgtgctgcggctctagactgtttgttttacgctggtgtttgcaccatgagaaaatcccctcgtaagattgtactgaagcctgtctccctgaagctaggtagttccctatcaccacgccactctgtgacttatttgttcattcataaatacactcatttgtttgttcaatcattaattcacttatttattcactgaatgatgaaatgcttattaagtggcttctgaacactgagcaaggcatcaggtgctggagatgcaaagatgagtagaggccgggcacggtggctcatgcctgtaatcccagcactttgggaagccaaggtgggcagatcacttgaggtcaggagttcgagaccagcctggccaacgtggcaaaaccccatctctactaaaaatacaaaaattagctgggcgtggtggtgggcgcctgtaatcccagctactagggagactgaggcaggagaattgcttgaatccaggaggcagaggttgtggtaagctgtgatcacaccactgcgctccagcctaggcaacagagcaagacttcatctcaaaaaaaaaaaaaaacaaaaaaaaagatgaatagagatgcatctcagtgtctggaagcccacagcctctaggtgctggacaggtaattcacagagtgagacagacacatgggagggtttaccctggggcctgtgggagcaccttggtgcccagtttgttctcaaaggatctgaaagggcaaggaaccacttcaattagctcagcgacttctttggcaaggaggagtaactctttccctctgtagaattaggccaatcctggtgacttcctggaggaagcagacaagtctcttttagccactgtggctggctgctgttctttccctggctgggagccacagtctaagtaaatgccttgtcacatacagaagaggccctgggagaagagtccagtgggtgcttcccaggaaggcatcccaggctgggaagggagggagagggccggagcaggatgggagctgctgaggcccagtgaaagctttgttgcaccctacacaccacatagggggcctccccgagggagagcactctgggggacgcaggacagttctccacaccagaaagtgagaggcaggctcctggctccagctcatggccccctgaccatgctgtccttggaggcagtggctcatgaatggaggaagacacatcaggtggtcaggggtgtgaggctcctactgggaccctgcagctggagcgtgcagagaacctgtgaggccccacactgggaaggagggctcacattttatccatttccctgtctgccttaggaactgtccatacctgccccacaggggctctgggtgtctcatgggagggctgcacccccagtatgtcagaacgtccatctgcagcctgcagcagaggattgcaggcactcgtggatacggcccctcttctttttgggtggtgggtgggacatgaactgaacgagggcttgctatgagaatgggtggaagtgacttctagtcaattgccctttatcttctgatgaagcaaaacgtcatatacttagatattaagccagagacaaacacattttctcacgttaaaggaaaggctgagggcggaacgtccccacttcactttggagccgggccccacacacattttcggggccatgcgtttagtcatcctgctggactatttgggcagctcgctttccttctctgggctttggctttttcctccacatcatgggaatttgggtggggaagtgtagaagattcggagacgcctctcagcttccatttttccttcatctttcaatgtttcccccacctttctctcctctcccttcctaaatgtttccatggcttgggggtgattttaaagggtcttacctgctgttccttgagtagagaattaacgttcctagggtccaagtatttcctcaatttcctgctgtttttttttttttttttttttttgaccgagtttcactcttgttgcccgggctggagtgcagtggcgtgatctccggttcactgcaacctccacctcccaggttcaagagattttcctgcctcagcctcccgagtagctgggattacaggcatatgccaccacaccaggctaattttgtatttttagtaaagatagggtttctccatgttggtcacgatggtctcgaacttccaacctcaggtgatccggccacctcagcctcccaaagtgctgggattacaggcgtgagccaccacgcctggctgatttcctgctgatttttgcatctgagcttcatcgtgtcgtctctgagggacccatgtgcctggtgaggggctggggagactctcttctatctcatttcccgtgggccccccttccacctcccatctctcctggatgccatagaggcagagccttgcagctggaggggcactgccagggcccctgctttacccagcacgtctgtgagtgtgttaactgtggccgaggactctggtgctggcccttaggagctgtgtggcccagcaagggctcctcagcctctctgtgccttggtttcctccatgtaaaaatgaggacgatggtagtgtttgcctctctttataaagcccttagtgaagactccagtgctcaatagacgtcatctgttatgaggtttatttctacgctatacaatacaaacacaaacaggtgaaaatgggcaacttggccaggggagtggttggtttttcatttttatcattttcattttttttttttttaccccattgaatgtttatttcatttgggtacatctttctttttctttctttctttcttttcctttccttttctttctttctttctttccttctttctttctctcttttttttttttttttgatggagtctctccctgtcacccaggctggaatgccatggctccgtcttggctcactgcaacctctgctttcccggttcaagtgattctcccacttcagcctcccaagtagctgggactccaggtgcatcccatcaagcctggctaatttttgtatttttagtagagacagggtttcaccatattggccaggctggtctcgaactcctgacctcaagtgacccacctgccttggcctcccaaagtgctgggattacaggcctgtgccactgtacctggcctgcagagtgactgttgggaggtgtgcagctcacggggtcggcctcactggtttgtgtcattgaatctggtagccatttgtctatatccctagtgcgatgttgggaccagttgtttgcatcaggctctcttcgctggaggttgattagggtgcccttgtcgagcagtcactgatgctgtcctaggcaggcagctttccttctctgtgtggagcaaattcaagatggtttagttcctgcccaacatgccacagtgagtctcaattcaaactgactttaactacaattataaccacagaggagcagtgagattcacggaactggaaggtctggactctaactgaggtggagttagcagctcaaacggcaaccccatggacttacctcatagtagcaaaatggctgccatagctcacacctcacatccccatgccaccaaacagagcagcacttttttctagaggtctagcaatgatcttcttgcatcctactaggtgtttttgtactattatgcccattcctgaaccagtcactgctgccaggggaatggggtgtaccacttggttcatggcaaggaagttagtccttggaggagtgggaaagagagaatgccagctcatccatcccgtggccgaatgtgacagagagaagctttctcacagagattcagacggaggaggaggcatggagcttgggcaactaaatggtgtccaaaatgtcaccgctccgaggttcttctagtagcagaggcactggccctcctgctcaggatacctgaagaggtgtcctggcctccctgagcaaggtggtttggagtctgcacatggtgacgaggttctgtcctctcattctcccatcacagagatatgactgtgttacatgggtcagcgagttctttggccactttctccaggagtccattcctgcctgttctcttctttttggtaatactgagtctcatctcagctaggaagtgacaatggacaccagcaaagccaaatgacatatccttccatgtggccactgtgtgtgcaggactgtgtccctcatcatgttagtggagaaaggggtggcacccaagaggaagggaaggtgggattccctgctcttgaggagaagctggcctgtctttgggaatggcccacacataaaagagagttgggaagccacagaaaaacagtggttagctcagggattgcgactcagggtgcagggcctgggatgtcctctcaagcacaagggaacagcctggtcatcttccttgcacctccttctccttcactgcctcttccccaggtagaaacaagatgcctgccccccaaacctacatttgtcctcactctgaaaggacacagaaggagataagactgcagggtcaggccgtgtgggcgcgtcggaggggttgggcatagggtgagcccaggcctctggcatgggctcccatttccctgtttcccaggagtgttccacagaaggtatcactgggaatctgccctcccagagattcccagaggtctggaggggacagcgtatcagcggttgtgtaaactgaggcatggagaggttggattgagttgtaaggctagaagtggcagagctggcatttgaacccacctctgtgtgacctcacgccttttaactccacctttgggccatgctgggagttgtgtaaatgcagcagaaggcagaatgcagctcaccagcaaactcggctgctggtaggacaggctgcagggaggtcagaggtcaccacttccctctctttgcttctcagtaggagtcatcccgacatcccttcagagaaaggagcagggaaggaggatagcccagcacttactcccttggtgatgtctgatgggacccccctgagccccacacttaggcttgaggtgaccccccagagctgtggttgtgaatatccccgagcccctgctcaaggtcacacttgttcccctagtgtctaagacagggaggaggaaaggggaagaggccctctgaggccccaggagcatgggctggcagacaggccagcacagcctgacttgggctgcccggctctccgcctgtgtgagcttgcccccgtctcagttccccagtcccttctgacactatgatgcttcatgagtgtcctttacatgctctagcccgcagctccgtgtggggagatggcctgcatgtgtggctggtgggagaaggggcctgcaggtagaagaacgttgctggcaccgccggtgctgccttgtgcatgagcttgcagacaccatccggaagtcagctctccacccccaccccttctccagaagaggagagactcccccatcagtagacaaagagaaagagaagaaggagatctctaatcctccggcctggtcagggcagtccatggggttgtaaattaggagggctagatgattgtctgggagggcctccagaggaggggtggctgagagttttgttgttgtgggcacagagggctggagcaagcagccactttgcactggacacatgcagcaggaagcttggggctggcacgaggccctggccccacctaagatgctcttggagaaagggcccaggactcagtagaggggctgagtctgctgtgatggatgggaggaggccagcaggttcttttcttgtgattttgtgtgtgtgagtgtgtgtgtgtgtgtgtgtgtgttgaatgtgtgttgtgcatgtggggatatggatatattggtgggtgtgcttgtgctgtcttggggtggtgatgctgtatgtatatctgcaagttaccttaatttttcaggtgtaggtagctgcgggtgcatgtatccctctgtgcctgtgtgtatgtgttggcgtgtgtgtcttgggctatggctgtcttggtatgagagaggatgtgcctgtgttgagtatgtgtattgatgtgtgcacaggtgacagtgacttgggatgtgaatgtcagtatctttgtggttattgggaagtgttaggatgtggcatttgggtgtgcaattatgttgctgtgttggcatgggatggggtgtgtgttgtgtggataaggatgtgtgtgttgtgatgggtgtatccatatgcatttgcctgtgttggaatgggatagggtgtgtgttgtgtggataaggatgtgtgtgttgggatgcatgtatccatatgcatttgcctgtgttggaatggaatggtgtgagtgttgtgtggataaggatgtgtgtgttgggatgggtgtatccatatgtatttgtctgtgttggcatgggatgggtgtgtgttgtgtggataaggatgtgtttgctgggatgggcgtatccgtatgcatttgcctgtgttggaatgggatggggtgtgtgttgtgtggataaggatgtgtgtgttgagatgcctgtatccgtacgcatttgcctgtgttggaatgggatggggtgtgtgttgtgtggataaggatgtgtgtgttgggatgcgtgtatctgtatgcatttgcctgtgttggcatggattgggggtgcatgtgtgttgcatatcatgatggcttattattacatagggtggatttgacctcccccaaggactatgaccttcaactttccttagaggagaggtatctgggttctgagactgtccttgcccctttttccaaaaccttcgctcatcactagaggggtcttccctccctaatgctggctcagcctcaggtggaagatctggcttttggggtgcaagttgggaaatgcagaaagccctgccttccagtatgcagctgtggcctctccagcctcaagcacctcctggaagaagctggggcttgaggctctggggtccccattcagggagcctctgttctggagctcagccagccttgtgcccggaggaggtccgtgagctccatgaggcaggggttgtgttttcttcagccgtctttccatcatgcttccctgcacggggcatagagcacagcagatgtcagggaatgtggtcaacttatacagaatgaaatgaaatgccttctctcagcacaaaaggcactttgcccagcagccaactgggatttagtccttcccaccgctcttcctgtaagaacctaaatttacagcacagggcctgccaccgtagacttttggtgggggttattgtgagctgggcaggttaccaggtgcatgagggagcgtgggggtttgagatggggtgcaggcatggtggtgtggctcggggatgaaacctcatggtgatgtgttctgtttgctgtcagcatcctcgggaccccctctcagggacagtggtgaccttggctccatgtccaacttctccctggatgattattctccttcacgagcctaagaggcggctctaggagtagctgttttctctcttgcctccctcctgttgaagttcaccaacagagtagctgcctcattcacttgtgcctgttggaagccaggggtacaaccttcaactgcggtcactgcctcttaggtctgcggagtgtttaaggcctaagccctgtggccagcacctgcaaagtgatcacatcgctgcttacgggtttagctgaccaagttctatggacacgatgaaggattaggggtgcaggcctggggcgatgggggtggaagtgagtctgactgagtttaccacaaggcagggatttcagaaaggcacccacacattctgcagccagctgggggtgtcgaccagagcctggggaccagacggcgctgggccctcgaggggtaaaggtcaatcagcttttcctgacctctgcatgcacataacataggaatctccctttcctgaaattccaacacatcttctcccagccatttcataaggtcagaaagaacaaatttcaagaataagaaggtagtgggttaggggagtcatgaattggatgaaaatcatgggatcatgattttcctggaaatcaccaagaccccaagtggcagctccgccagcttctgcttggaaatgtgtgcagccaggtgcattggggtcaatggtccttttttggttagtggttgatgacacgctgtcatctccaggaagtaggtcccatgggaagaatggcacatgggtccaggagactattcaggggagagagagcctgagcacaggagaaagggcagaacatgagtgcccaggagggagagggcaaagcggggtccatcagggtggggctcctcctcctgcccgagttccttaccaggaagcacaaggttctgtggaggcctagagggcccctttgatggctgtggctcttcggggaatttggatggaaagtggctggaacccccaagggatgcagcactctggagaacagggactgcctgatgagaactggggccgtcggggttgatgagagagcagtgatgtcagcccaggcaacagagtggtcattggaaccatattgtttccacgcttagaatcccccagtgacttcccattcatgaagtacggagttaaatctgtggcggacaaggccccatcacctcccactctccctggtctcactctgctgaggccctgccaccttgcctctattctcattccctgaagccagccctgtagtggcctcagcattgcctgctgctctctcaggcctgctctccccgcagaccatcctgttactggcttcatctcaccttcacctcaacgccacttcctctgggaggcctttccagggaccttagtaggaactatccctccccagtcaccccctgaagatgtttctctgtaggatttgcatctctgaggtgtttggagggcaccttgttcactcttcctggttttcttcttcactcattcattcattttctttcttgtgtatttgttgacttgcccctggtgtgagcgccaggagagcagggttggtcccttatcacatcgccagcacccacggcagtgcctggcacataatacagactcagtaaacacttttttaaaatgtgtggtaaaatacacgtaacaggttgggtgtggtggcttaggcctggaatcctggtgctttgggaggccaaggcaggaggatcacttgagcccaggactttaagaccagcctggccaacatggcaaaatatcatgtctataaaaattattttattttattttattattttattttatttttgagatggagtcttgctctgttgcccaggctggagtgcagtggtgcgatctcggctcactgcaagctccacctcccaggttcatgccattctcctgtctcagcctcccgagtagctgggactacaggcacccgccaccacacccagctaattttttatatttttattagagatggggtttcaccgcattagccaggatggtctcgatctcctgaccttgtgatccgaccacctcggcctcccaaaatgctgggattacaggcatgagccaccgtgcctggcaaagaattttttaaaaaattagctgggtctggtggtgggcacctatggtctcagctactcagaagggaggaggctgaggtgggaggatcattggagcccaggaggtagagactgcagtgagcaatgatcgttccactgcattccagcctgggcgacacaatgagaccctgtctaaaaaaaaaatacatataacatagaatttaccattttaggctggacaccatggctcacgtctgtaatcccagcactctgggagactgaagcaggaggatcacttgatcccaggagttcaagaccagctggggcaacaaagcgaaactccattgctgcaaaaaaaaaaaaacccaaaccaaaccaaaacaaaaatcagctgggtgtgatggtgcatgcctgtagttgtagctactcaggaggctgaggtaggaggattgcttgagcccaggaggttgaggctgcagtgagctgagatataccattgcactccagctttggtgacagagtgaaaccctgttagaaagaaagaaagaaagaaagaaagagagagagagagagagaaagaaaagagaacttaccattttaactgttttttttttgttttttgttttgagatggagttttgctctgttgtccagtctaagaaagaaaaagaaggaaaggaaggtaggaaggaaggaaggaaggagggagggagggaaggaagaaaggagggaaggaaggaaggaaggaaggaaggaaggaaggaaggaaggaaggaaggaaggaagggaaggaaacttaccattttaaccattttttttgttttttgttttgaggtggagttttgctcttgttgcctaggctagagtgcagtggcacgatctcggctcactgcaaactctgccttctggttttaagcgattctcttgcctcagcctcccaagtagctgggattacaggtgcccaccgccacacctggctaatttttgtatttttagtagaaatggagtttcaccatgttggccaggctggtctcgaactcctgacctcgtgatcctccgcctctgcctcccaaagtgctgggattacaggcatgagccactgcacccagccttaaccatttttaagagcacgatttgtggtatgagctacatgcacatggttatgttatcatcaataccacccatccatagaacccttctcctctggcaaaactgacactctgtacccattcaccacaactccccatttctctcgccccccagcacttggcaaccacccttctactttccatgtatggatttgagtactctaagtaccacatataagtagaatcacacagtaattgtccttccatgtctggcttattttgcttagcatggcctcctcaagattcattcatgttgcagcctgtgacagatttccttcctttttacggctgtatagtattctattgtatgcatatcccgaattttctttatccaattcatctgctgatggtgtgtccttttggctgtttcagtacacacttgaataaatgaatgacgacaaggagggtggatctctgcctcccttcccctgcacaagacaggagtggcagctttgaacccatgaaggccattcattcatggattgtatcctatgctactggctctccagaggccagcgggacctctttctgcagtaatgtgctgtgctatggggtctggaccttggccaagatactgagcatttctgagggagggttttggcgtcaggaatgggcctctgctcagaccttaagccactgggtagctactgtgtaccctgagggggtcacagccctttccacagcacctggagcagaggcaccctggtatagctccctctcctaaccctgcaaggcaagctgtgccacagccctggccgcacagcggcctgtgtgagcccagtgctctgccatccgggaaggaggtgagggaaggggagggtgtgaccccacagtgcctggagctcatgctgggagtgagtgagcacaaacaggcaccagcgccccgtgaaaaatgtgtcaccgcccacgacaagatacgctgcgtggtttctgtaggaaactgaaattccagaaaacaacccctgtggtccagtgtgttttactggaagttcagacctccccttcaagcttgccttgtgccttttagaaacagaatctctgtctcactccccaacccagcctaggttaatgctgagaccagggcaaagaggaggacttggcgataaggcttggggctgggaagatgctgtgattcactttgatgtcttggaggggcaggttgtgaggatggaatgaggaaggggaagaccccagctcgaacgccaagcttcggtgggcctggtgggctggccaagtgtcatagctgctgcctgcatggggtcctgtgtgccacgccaggcacagggcaggtgctggccaagtggatctcccccgccactctggcagttcataaactgggacctggggcgaggggtctgcattgagctgggaacacaaacctcaaggcccgacttgtccagatgtcacttggtggtatggactctgcaggggttcgtgagggctgtggggttcttgatggtggttgggagagctgggaaggcacggagcagcatggagggatggagatatggtcttgggggaagctggtatgctggacagaagcagcaaatgtcgtgagtgcagagtagagcagcgcttgggagggcctgggcaccgatgcccatcgacacctaggcagagatggtgtggaccctgagatcaacagggagaagaggcatggggagctttggctttgggggtgcaggtgcagagagggattccaggcaggagtgtgctcatcccattcccacctgagaatgtccagaggcgatgaggattgtcacacccaccccataaaggggggcccctccaggcctcctggggctttctcccttccctggcacctggaagacccagatacccatgacccagggccctgggggactgctgcagacccactccctgcagcaggatgtcccctgcaacatggtgctgttgaccaagccaagtctccaaacatagacataaaagaaaggaatgaccgggcacggtagctcacgcctgtaatcccagcactttgggaggccgaggcaggtggatcacgaggtcaggaggtcgagaccatcctggctaacatggtgaaaccccatctctactaaaagcacaaaaaattagccgggcgtggtggtgggcctgtagtcccagttactcaggaggctgaggcaggaggatggcatgaacccagaaggcggagcttgcagtgagccgagatcgtgccactgcactccagcctgggcaacagagtgagactccatctcaaaaaaaaagagaggaagaggaacatggcaggagtccccagcctgctgcaggctttatcacacctctgcttgcccattagttaccaggaaaaatcttcctcctcaaagggagagcattacaagccaatacacctggatccctattctatttctggggtgcccaacaacccttggctgatagaggcacattccccaaagggtatttggtagttctcaattaatggaatgaagccatgcacaggtgtacccattccacacctgggtattccacacctgggcaccctgctcctctggggacgctcagcctggcttacagctcccaccgcccacctgcctatgtccatcatgggtgtgataggagagggcacctcagagccagccagggatgccagaggtggatggtgcctgtcctggaatctcggtgcaggttgtagaggggatagagtgaagtcagcttcacccagactgtccccagcccacccccacatcttccccacatgctattcactgctagaaacataatatttagctgacggcaaggaagccagagaaatcagcagcaacagtggtctccagggggagagatgtaaccaaaaaacaaagtgtacgagttagagtcaattccagagcctgtggctgcttcaagctgccgtggacagcctcctcccaggtgagtcctgagggaggggtttggggaggaggctgtgcgattccagggggagcaggaggctttctgtctgccatcttccctatgatttttggcttgttggtactagtttctttagctacacccttttttgaggaagggaggcttagaataaatttctaatttttgaatagtgttagatttgcagaaaagttgcaagaagagtccaaatcttcttatactccatgcccagcttcccctgttgttaatatcactgtggtactaatatcacaacacatgaagcaatgttgatgttatcattaaccaaagcttatactttactcagatttccttagtttttacctaatgtcctttggtctaggatctcatccataataccacattacatttagtttttttttttttttaattaataaactttgttttttaagagaagtttcagatttacagaaacattgagtggaaagtacaaggggtggccatatgcctccgaccccacacctcccccactaatggacaacctgtgatagtttcttagactttccttgtttttgatgacctcaagacagtctttgaggagtcctggacgggtattttgtagactgtcttttttttttttttttttgagatggagtctcgctctatcgcccaggctggagtgcagtggtgtggtctcggctcactgcagcctccacctccctggttcaagcaattctcctgcctcagtctcctgagtagctgggattataggtgcatgccaccacgtccagctactctttttgtatttttagtagagatggggtttcaccatgttgtccaaactggtctcaaactcctgacctcagacaatctgcctgcctcagcttaccaaagtgctgggagtacaggcatgagccactgcgcccggccttttttttttttttttagagattgggtctcgctatgttgcccaggcttatctcaaacacctgggctcaagcaatcctcccacctcgtcctcccaaagtgctgggattacaggtgtacgccaccaggcctggcttagaccgtttatcagatgttcttctcatggttagactggagttatgggaggaagtttgtgaggaaggccagggagataaaggaccattctcatcacatcgtgtcctattaatctggcttatcactgataatgttgatcttggtcacctggctgaggtagtgtctgtcaggtttctacgcaggaaagccacagctgttttaaagataattaacaggcaggacaagctaaataatttatagagctcagtgcaaaatgcaaatgtggggcccactgttcagtcacaaagaatttcaaggcagaaatagaacattaaaccaaattcagggtgcttttaggcaggggctcctgggtgacgtgcacaggtcgcagtcccatgagactggtcttgtttgcagggcaattgtcagatcacccagatgcccctagagctctttctgcatggagagagaaggcctgtgccagctgtccttgatccctggacagttggaaggggcagatggctgaggaggatcctaggtacccatagccatgtgggcaaaacagtatcacgggcagaggatgtcatgaacatcacaggtgtctgcagaggccctgctgaggcacctgcctggtaacatgaaaaacttgaccggaggtctgcctggatagagagagaatggttgggtgtgtgcaggagccagtggttagtaacaaacagcagcaactctgtaatttttttttaaatgctacttttatttttaagtttttttaaaattattttcttctttttctcagtgctcaaagcagcattttttttttctggaacaccttagaatagcttatttaccaaatgctacatgagcctttatgctgggcaaaccgaggagctccattagagggggacacctggccttgaccgcccccatccctacagctttcttgttaggagaggagggcatcgcgctacctggtctcaggtgcatacctgcggaagcagagtcctcacgatagcagggagaagagtgtagggagaagagtgtacagctgccaaccggcttctccttgctattattcacccagctgtttagagaaggagagagtatttctaatcagccatatggcatggagttttatttgccttggtaagttaaaatgtacattattggtcagcatcttgcatgcaaattttgacattgcattccaggagtacctgcggaagagagtggcggcaggtcggatctgtgtaattacattgctttgtaggcttgtaacattgccatcactaacgatgcccggtatctcactgcgacggctgcctggggatattgccgtgagactcccgtagccagagaaagattatgtaaacatgtgtgatctcaaaagtgagtaatgaagttgagtacttgttgcaaaaattaataaatggctggtttacacgtgatggaggagtcccttgtgtgaaaactgagtcacccagtgtagtgatggataaacgcacttcgaggcacaggtgacttaaagaaattcatccttttctctactgatgtgatcaaatggacaattgcagtccacacctttcactccctacttgactaatatgaaatcatcacgaatatatctttctcctgctcttggcctgtcagaatcttaactcttgcttcaaaggatggcatgtcagctctatggggttacctgcagtttctggaatggtctatgttgtccaatgctgcaaggaagtgctccaaggtggccttggaccgatctgattctgccccctttctcacttgtagttctcaagaataagggtagaggccgggtgaggtggctcacacctgtaatcccagcaccttgggaagctgaggtgggcagatcacctgaggtcaggagttcgagaccagcctggccaacatggtgtaaaccgatctctactaagaatacaaaaaaaaaaaaaaaaaaattagccgggcgtggtggcacacacctatagttcctgctacttgggaggctaagccaggagaactgcttgaacccaggaggtggaggttgcagtgagccaagatcatgtcactgcactccagcctgggtgacagagtgagactccatctcataataataatagtaataataataataataatggtagaatgttctggggatataacatcttgagattagggggagctggccaaaacaccctggcctctgatacagttccccctagaaattagatatcctttggtgttttagcccagcgtgtcccatggccccagagtatgcaaccctgggggctgcttttccaagaccctcagttgtagtgcaagtggcttatacagacaagactacatccaccccaggaagctttcttgagccttaggggacccacttgcaataaatcttaggcttctgtccaccttgctgcctatctgtaagtaacaaatctgcttcacataacctgttgcatgtattctgtgtcattgaacttggacaggctggcacccatcctcacacatgcctccaggcctttacacatgcaatttgttcactcatatccttggagccgctacaatgtatcctgaagttattactcacctactaaatgtcctttgagtcacagctcaagtgccacctgctcagaggagacgtcccgcccatcctgtctggaaaattaaccccctgcccttctggcccatccttccttgatgatgcttacctttctgttttagctgtctctcctccagggatgaatgttcgtgaaatcaaactgaccagggtccagatctcagttccaccaggcaccagcttgtgtggccttcagcaagatactttctgaacctcaaatgtgctgtctgtacaatgggaaaacactagtttctagtttgtaaagctgttaggatgagatgatgtgcctggcccatagtagctgctcagtgaatatttgttccgacatggatgaaggaagtgagacttttgtgatgtctgactatttttagactggagaggaagagggaggcatatgggaaagaaggcatggcagagacaaaggtgaagcacattggtgagctaggtgtgtttagtggatgttgacgccatgtggttgggaatgtgctgggaaccctggaaaaggagactagggccagactgtggaaggccttggacgccaggcaaggatgacatcctgcaagctgggaccagctagaggctcataaaccctctttctctctctctctctctctgtgtgtgtgtgtgtgaaatgattagggggtttatagcatggctaccctgtgagcactgtgtagggctccatattgttatctgggtcttgttcctcacgttttccactccctcagacacccgcccttttccccacctcctccagcagacatttgtggacctcctgggtcccagacagcagtgtggccgggtcctgtgtgaactcccccaacccctccccatcactctgtcggggtgaaagcactgatgtgttgtcaagggaggatattacacgaagcccctgaagtggtacattaaagcagtttggattttctcttactgctaacattgattactattaattaaggttgatatttacaatcagagggagtacaggagcagatcattttttattaatcactattctggattcatcatcagtcatcattatcaaaatattcagacagtggacagtggctgagttttaaaactcaagtaaatgataaaattaaactacattagagagtatatgttctctgtgacctctgtctttcctagttttccctcttgtcccccaatggtctcagcctcctgctgtgcattctccccccacatcccccctttcctctctcctacctgtcccttcccttcctctctctctcctttcttccttttcttcactataaacagcactaccctataattctgcagtttgcttttttctttcaaccatgtggcttcaagataaccttatttttgcgttattgttgttgtttggttttttattttgagatcaagtcttgctctgtcacccaggctggagtgcagtggcacaatctcagctcactgcaaccttcgtctcccaggttcaagcgattctcctgcctcagcctcccgagtagctgggattacaggcatgcaccatcatgcccggataattttttgtagttttagtagagacagggtttgactcagatttctcttagccctgttcctgtccgtgtaacatagccactggtcatggtggctcacgtctataatcccagcactttgaaaagctgagagggaggattctttgagaccaggagttcaagaacaagcctggacaacatagtaagaccctatctctagcaaaaaaattaaaaaatataagaagaagtataacaggccataaaatagatatggcctggtattttgtatgtatttttagccattccccaattggcgggcatttaagttattccctcccctttcttcccactgctgccatagtcagtgccacagtaggcatcttgtctgtgtcttggagcaggcaggaaagcagtctctggggtaggcatgaagaaacgggggtacagccacagcccactgggctccccagccccttctccatgtccttcctggactctagccaaacccaaccccacacgagccccagacatggccccgtgtactggctctgctgtgctttaggaccagccgctcctggaatgcttgatgaggggtccccctttctcccctgtctccccatgttcagttcctgcccacatctaaaggtatggggaggtgcctgctcctccagggacttaaggttacctgctttctcctatgaagctcacccaggaacttgtcactgtagagtgaaatgcattggtagctttgttctgatgatttttgagccccatgaagacggcaacggagtcgaactcatttgtctctccccgggtcattacacatgactaccaagggctcgtcttctgaagaacaaatgcggctgttggttttcccacgtgttagtaagagagtgagtggttcttgacattcttcagccttttcctccctggggttagggctggggactggggcttctcccaccttcttccctctgtggccccagtcatcatccactccccagcgcacctgggacccctgaattcgctcttactgagctacatgaagacttttggccagccgtggtgttaatccgtggactctggccattagcatcctggcatttggaatgagaaaagtgaaatttaggggatcctggtcttccttttaggagtctttttttaagtaggtaaacaattgtaggtaatttaatttgtctgttaatggcgcacatggatttactaagagggaaatgtcactgggttgtggacacacactgcatataattcgatgagaatcggcctctgatgggcagcaataaatgtcaaactgttcaacattgattgttcgtgaaggaatattgcttaacaatgaataaaatacctttctgagtttcctctattggcctgactttaaaaggaaatagggagatggactccctctgtggctcacggccgcttaggcttggaggcagggaagctgctgggaaatagactgctgggcttctgttctcaaacaggtccattttagtggctcctcaagcccgcctcccagagcagagggatgaatgcttagaggccctagtggctccccatgtgatttgcgaacttctccggtctcactgggcctgcctgcctcttggactccagggcctgtggctctgtggcacccactactctcctgctctttctgtcactcctcagaatgctccagtgtggtcctgccttggggcctttgcacttcctatacttgctgggtttttttttttaatagagatggggtcttgctatgttgtccaggctgtactgaaactcctggcctcaaatgatccttctgccttggcctcccaaactactgggattacaggcatgagccatggtaactagcctatattttctttgttaaggtccacttgtctttacttttccctgaccacccatccaatgtcaaagctcatcttggttgtgcccttattctgtctgtcccgaatcatgacatcacccttatgtatttaactatttggtattcttttatttccattgtactgacacgttctccatctccccactagaatgcaggttctatgagggcaggaatggtgtctgttttgtccagttaggtagcccagggcctagagtagctcatgatacaggaatgatatacattcttcatgatattcatacacagcagtaagtactgatggacccagtgtgttgaatgaatttctgcggagtcgtatgacatgcatgcattttatgaaacagcaacctcccaagacatgaaaaaaatatgcttgaggtttctttcaaatgaatctccctttaagcagaaatttctgctttgtggcgtgaagaaagcagagtattccagcagtggttggttccttctactttttagacaacccagtaatttgtttggagtgttgttgggtcagggggttctcactgacaggggctgtgtctgtcccctctggaaactgaaatctcctccactgtgctttgctgaagacagcagtggctgggcacaatgatggcaaactcttgagcttatcagaagaataaaaggacttaagtgaagtggagatttcttggtagttatcaccttctagaataaaaagaaaacctgattctttccttcatctcaggggatcctctattgttataagtgacctcggtgagggaagagagttttcttactctacagaaataaaaatctgtctgctttctctagcactgaagaaaaatagtccttttttcctttttctttttagaaaagcaccttgcagcttctgatgattgaggacggggtgggatcctccattgcccaaccccttagctccaccactctgcagacctcggcgtccttgaaggagctcgggaacagagatcagcatgtgtgggtcaggctgctgatggctcacatttaagaaagatggttcatggataatccttggtgtttttttttttttttttccaggataaagttttatgtttgaccctgagaaccagatattaagaaatatatgctatgaagtcattttggctgatttaatctaaacttcctgtatgctcttaggcagaggtttcaaggttgggagggtcttacgatctaactctgccccacgcggggttgaggaatgctgtggggctccgccagcttctatttgtataagtccggggtagggggcttcctgctgtctcttgagggggcccattcagagcctgaggagctctgatcttagaaagcctttcagatggggggatcctagtgaagctcatgggttttgggctcagtcaggcatggtctgagtctcagctctgtacacataaactgctggatccccagccaagtctgatcccttatgtgtataccggggaataatagtacttaccttagatgactattgtgagaattaaatgatgattatcttccttctaaacaacagcagagcacatagcaggcactcagtaaatgctctctctctttttaatattgccctgaaatgtgcatggtcccaggattccttggggtcctgtaagtcgaactggattctcccaaggccaagggacaaaatgtggtatagcttcgagtcttgagccttgtctgcttttcttattctgtgcccatctgaaccaatgcacttagtgcacaggacctgctgggttgaccaacgatgcatcatctgtgtaggctcagaggggctccctctccttttggaaactcatccttccgaggccatttttgcctgtctggggaccacggattctctggttcccactgagttactcatcactgtccaatccctcaagtcctttctcagaggcctggtgaagccctgccctctccccagtcctgcattgccactctgggattgtgtatcccatatcagttaggacaacactgaccgctcttataaatacaccctaacatctcagtatcaagacaccacagtttacttttctctctctcatccggagctcaatcggtgttgggcacaagcagcttttatttagggaccaggccagtggaagcctcatcattttcagtatacagtttcctgggtcacccaggacattgagatccagctgtcaggaaaagagagcaccatgagaatggagcaagagactcttctaagaagtagcagccttcattttgtccaaattccaccggctgaaagtcagtcacgtggccccagctaaatcagataagcctggaaaatatctgcggttgggaaactgcttccagcaacgaccctaggtcgtggaaggagacaggaattgctagttggctgctgtttcgactacagaccagatgtggaaaaggtcaacaactgtttgtttaattgcatcactcattttccccttggcctggtgggtcagggtgctgtgagggattccttcattcaggggccctcacgcacaccccacttccccagcactggccacctgcgcttgttccattcatgcctgttgggtttttgtccctgtcactgataaaaagcagtccacgaggcagcctcgggacatgtgccctgccacatcccagggtgagagtccctcccttccttgtgacctcagcacttgtttctgtaccctttgggtatggctggttaaccagccactgatccacttctttgccttgcttcagtttcacatttctcttttttatctccgtggaaatcaaaatgccctgctgagatgcagacacctgatgtctaatgcaggtctcggtccccagccttcagggctggttccaagggagcccgcgctgggctctggggattgctgttcccccttctaggcttgcctcaacttttgtgaaaaagtaagacccatgctgaagtcagtctcaggatcgattgtccatgacaattagctttccctttctccacagttcctcagatatcacagcagcaggtttcagcactgctttcccaagctctcccggttccatggtgccaatttcacgggagtgtggagatgaggattctgctggagcagacatgttcttcctgacagtctttgtcatccatctcaggctcccgtgggtcaacaggtctctcttccttccccgggacctctccttgcagggcagacagaacaatcccttctcctcttctccttccccaacgtgatgtcattgcttcctgcaccaaactatagttcctttctcagtctgtttgttttgctctgaattgaacttttaaaaagggttttttaccatcattctcagcaaactaatacaggaacagaaaaccaaacaccggatgttctcactcataagtgggagttgaacaatgagaacacatggacacagggaggggaacatcacacaccggggcctgtcgtggggtagggggcaaggggagggagagcgttaggacaaatacctaatgcatgcagggcttaaaacctagatgacggattgataggtgcagcaaaccaccatggcacatgtatacctatgtaacaaacctgcacgttctgcacatgtatcccagaacttaaagtaaaataaaaataaataaataaataaataataaatggctttttagcctgggcacagtggctcatgcctgtaatcccaccactttgggaggccgaggcaggcagatcacctaaggtcagaagttcaagaccagcctggccaacatggcgaaacaccatctctaccaaaactacaaaaattagctgggcatggtggatgcggctgtaattccagatacttgggaggctgaggcaggagagtcgcccgggaggcggaggctgcagtgagccgagttcatgtcactggactccagcctgggcaacagagttagaccctgtctcaaaaaaaaaaaaaaaagggtgggttggggggctttttagctgcccttaatactatattttttctttccttggctttcattaaagataagatcatttcaagtcccagtcacttatgtctgaggttccctaagaacatgttccttcttgtttccatgttttattcaaatcatcaatcaattaatctattcacttaacacatctatgcatatgtgcatgtgtgtgtatacatgtacttgtatgtacatacatgcgcatgagtatgctagatgcccactatcgtcttttcaaatctcatctctctgggggagtcacactggtttttctggacccaggcttcttccctgtcactgggatctctctggttgcacagtcggcattatgacacgtttgagagcatcctcatctttttctgggtcatttgcttgaccagcctctcgtgtcctggaatcctacctctcttttctgcaagtattttgaaccctggtatgttaaaatttaggatacacattggttcgtgatgaattacaaacatttattgagtttttaaaaaatgccaggcagtgtgctaacttattaaatggatttaatccttgtaacaactttttagaattgagttctttttaaaaattttgttgattgatttattttcattttttatttctatagtttttggggaacgggtggcttttggtaacatgggtaagttgtttagtggtgatttctgaaattgtggtgcacccatcaccccagcagtgtacactgtatccaatatgtagtcttttatccctcacccctcccgccctcaccacctccccaaagtccatcgtatcattcttacacctttgcctcctcataacttagctcccactgataagtgacaatatacgatatttggttttccattcctgagttacttcccatagaataatggcctccaacttcatccaagttgttgcaaaagacatttgttccttttgatgactgagtagtattccatggtgtatatgtaccacattacctttatactttcgttgatcagtgggtacttaggttgattccatatctttgcaattgcaaattgtgctgctataaatgtgtgtgaatgtgtgtgtgtgtgtgtattgtgtgtctttttcatgtaatgacgtcttttcctttgggtagatatccagtattgggactgctaggtcgaatggtagatccactttcagttctttaaggaatcttctgttttccacagtggttgtactagttctcgtaacaggtaacagctttctgaggtagatactgattttatcctgcagtagaaaatggggatctgaggttctgaaatgttaagtaacttccccaatgtcacacaggaagtgctggagtctggatttgagccggtctgttttattccttctctgtgctcctaaccattgtcccatcactgtgaccccaacctacctagcctcacacacctaggattttgagaactctaagacaaacataattgtagttgtccaagattcttgcttttttttttctgccttaactaattcctccctattagttagaactaaatctagagttttaaaaatattccttcattatattctctacggtctggaaaatgaagttatcatcaagataggtcaaggtcttgtcagatgaatgaaaacaacagtaatgatgtattttcctccccattaggtctgatgcctcgctttccagccagctcaaagttctaatggacggtcagagtgaaatgttctatcagtcccttgtccagccccccagctggttgaattgggagttttgtgtttgcaggggaccctctatttccccatctgtctgggtgggcttcagcaagcttctagtatcagcatctccatagcgccctcctctgggtccaccccttgcttggtgctgtatgcttcttgctttgggcagacaggagcctggggacaccactccttcaccatttctgttaggtctggcctttggggtccagaagtcctggggacaggggtgccccatgttctgactcccatcctccaggctccagccccaccctcactgtgaggtttatttagtgttctgtgttggcccagtgcccacctcattggaactggtgacctccttgacaatttgttttctcctgtgcatctccaggctcctcccacactctcttctcctctctgggttgtacctgttgtacactgtgttcctagggtgccaggtcagtgagcaaggtggctccccttggcaggtcagctggcctcccggaaaacatggtcctctccccttctgggaaatgcatcagagtcccagctgggaccttttccaaggcctcaagtttccttcaggtgtcccattggcacctcaaactcagcaggtcccaaatgccgagtcttccgaatgggtgtctcctgccatgctgcctggcggggtgaacagaccccaccccaccccaccccaccccacccatccaacaaccagaacacccagggcatggtccaggcggttccttctcacaccccttggagacccctctttctgcttcttaaacaattcttgcgtttgtccccttgtctgtcacagatctgaatctccacatttgaggtcttcatgggtttccctcttaaacacagtttccgtctagttcgttcccggtagcttgctccaaaccctttcccccagatctctggaaggatctacctaaaagccaacctgatcatgtcacttctcagtttaaagcaacccatgggccttcagaaaaaggccacagtctcatgagaaccttcagggtccagcccttgcccacctctgcagctgtgcctcttggtccccacagtctttgttctggggtgggggtctgactcctgcaagtttccccaccctgtattccatcattcctctgggtctctgtgtgttcagctctctctactggaaatccccctctacctcaccatcccaattctttgccaggctgacttctgccttcctttggaagtcatccccctgaccccaagtctctgttaaacccagcccatccccgctggtgcaccctgccccatcgaatcacaggtgttctctctctcactccctcctacgcctgaccacctggacacactccatatactctgttgaatggatgaatgtatgtcccagaaattcaaattcatcagtgtggggtgttttctctcattttgatttttttttttttttttttgagatggagtctagctctgtcaccagactggagttcagtggtgtgatctcagctcactgcaacctctgcctcctaggttcaagtgattcttctgcctcagcctcccgagtagctgggattacaggcacccaccgtcatgcccagctttttttttttttttttttgtatttttagtagagacagggtttcaccatgttggccaggatggtctcaaactcctgacctcgtgatctgcccaccttggcctcccaaagtgttgggattacaggcgtgagccaccgcatgcagcctgattctttaatatatcaagtaagtgtttcgccccatccttgttctttctctgtgctcttagcccatctctgtgcaggacccatgagcttcttgtttcgtttctttgagcaagtagcgcactttcttttttcttcttcttcttcttcttctttttttttttttgtcttctcttgatcttttttggaaagactgtggaactccgtgtgagagctcttaaattttctgggactcaggaaagtggggggacaacatctcttctttgttataaggattaattactttgtaaagtgctataagctttgtagagtagaaaatcaaaccttgttgccgggcgcggtggctcacgcctgtaatcccagcactttgggaggccgaggagggtggatcaccaggtcaggaaatcaagaccatcctggctaacatggtgaaaccccgtctctactaaaaaatacaaaaaattagtcgggcgtggtggcaggcacctgtagtcccagctactcgggaggctgaggcaggagaatggtgtgaacccggaaggcagagctttcagtgagcagagatcgcgccactgcactccagcctgggcgacagtgtgagactctgtctcaaaaacataaataaataaataaataaatacataaatacataaataaaataaaataaaaaaaggaaatcagaccttgttaaggttccacccctgcacgtttccttcttcccatggtttccttcaagcctctagctatttttttggtaacagctttattgagatataattcacatatcatacagttaatgcaaagtgtagaattcaatggtttttagtctattcatagaattgtgcaaccatcaccacaatcaattttagaacatttctatcatcccagaaaagatactctgcaacctttagctagcaactcccagcccaagacaaccgcacatctctttcctgtcactatagatttactgattctggacgtctacttgctgttcttaaagctcatctctgtgcaggacccatgagcttcttgtttcatttccttgagcaagcagtggatctttttttcttctttttttttttgtcttttcttggccttttagcaaagactgtggaattccgtgtaaaggctcttaacttttcttgaactcaggaagcaggcggtggggtggggggaaacatcttttctttgttataaggattaattactgtgtttgtaaagtgctataagctttgtaaagtagaaaatcaaacttttgttgattttctaattgttccaaattaatgtcattttctcaggtttttttcttaatttgggatacctcattagcaaaaaatatcaaatttcagagaaagatgttctaagcctgcttttatcatatctccaacctggagaacccatagcaagggaagatgagctcagagaggctgtggaagttgctccgagaccagtaaaggtgtgtttcattaggtgggggttggcgtcactattatccatcaggaaagggagagggtgctcagtctgccagtgacacatgtattttctttctttttttttctttttaaaatttattttgtttaagttccgggatacatgtgcaggatgtgcaggtttgttacataggtaaacatgtgccatggtgctttgctgcacctatcaacctatcacctaggtattaagcccagcatgcattagctatttattctgatgctctccctcccaacctccccgctgacaagccccagtgtgtgttgttcccctccctgtgtccatgtgttcttatcgttcagctcccacttaaaagtgagaacatgcagtgtttggctttctgttcctgcattagtttgctaagggtaatggcatccagctccatccatgtccatgcaaagaacatgacctcattcctttttatggctgcatagtattccatggtatacatgtaccacattttctttatccagtctatcattgatgggcatttaggttgattccatgtctttgctattgtgaatagtgctgcagtgaacatacatgtgcatgtatctttataatagaatgatttatattcctttgggtatatacctagtaatgagattgctgggtcaaatggtacttctggttctaggtctttgaggattctccacactgacttcctcaatgggtggactaattgacattcccaccaatggtgtaaaaacgttcctatttctccacagccttgacagcatctgttgtttcttaacttcttacatgtattttctataataactcatctcatctgtttttggcctacttggacttggtcctagtactccacaaacatttccttggctcagataaagggcaaatgctgataattcacctaaggagggaataaaactactaagtagaaggaacacagttcatctgctctagtatttaaaaattacaaacttaaataaagaaccagtggccattttggtctattgaatgataacaaatattaaaaactgaaactcctgcctgccagggatacagggagccaggacttccaacaatgctggtagccttctaagtggttgaaagatctgtagaagacaatttgtcaatacccatcaggagtaatgacacgttaaactcgttgacccagtaattctgcttctgagaatctattttaagaaatttatccaaagtatgaaaaaagttacctgcgtggaaatgttcattataacatcgtttaaaatgccaaaaattaaaacaggaattgtgttaaaatgtatggcactggggcattccatggagacagagctccttgatggacatgatgcagccatttacaatgatggttttcaggagtgtgcacaagaacaaaagaaggaaacacaactgaatgtggaccaggggccgggccatgtgaaaagctgtgcacagtaaagcaatgggagggagaaatgccaaaataattactgcaggggctttaaggcatagaactgatgccttctcagtctctctctctttctctctctctccctccattcctccctctttctttttcttttgtccatatgttttatgatgtatgacattacttccataaaattttttaagaaaattagaaaactcaaccccctggtgcatgttaagaaggtcaaacttactgttttgttcttcaaaaacctgaagtcctgaagtgaggaccaaagagatagtagtaaactagcataatgatcacattccctggcattctatagaaaatgacaatttcccccattccctgaaacaaatcttgactaactttgatagttcagcaattagaactttggcatacaatctttcttcttcaactcctataattagtggtctccaattatatgaatcaatttcaatttctataaatcagatgatttagagagaaggctgttcaatttccttttcaactgtatggtttcagcagcaataaaactctcagcttaaaatatcaggatgcaacttgctccagaaatattacccagctcatttagggcttctgccggccgccacagcagttcccaggtttctaggtggtaccacttatctgtctgctcctgagccctgttcaattcttcttcatgggatctgacatctacttacagatttccctcccagtgtgggatgactatccctagaccttcctggtgttctaacagaaagacccagtttggacccagatgtatctctctaatgctagttagcaggcacttttagtgtctccctttttttcagtcctgggtttttcaatgtcagtggccctctaaggtgttctgcaggatgtgaaacctccagcctgaatctcctctaagcctggcttcgggaagtgcccgttgcaccctgctactttgtgaggactcttcatgaatcaattcctgactcattcccggaatctggagttgtggtttctttttctcctttagtcctttaatgtctgaaatgtgatttctttcatctcacaaggagcaagtcttattattaattttaaaaattcaaaaaggaaaattatttagctatttttttaattaaaaaaaaaaaacaaccctgagagtctcaacagactcttctgagcatcgaatcacatagacactttcatgtggcattaactcttccccattcgctaaaaggaaagcaagccaggggcagagggcgggttgaggggtcagctggaggaatctgtgccgaagagagttctgggttgcaaatgcacagcctccctcccctttcttctccccttggaggagataagtggccaaggcttcagtttgatgctaatgtggtttttagcaagatgtctgcttttggttgaagattggcctatggcttttatagtattcttaaattcagcttatgttgaattattattgttcctcattttgtgcatgacttccagttcccgaagcattagagtctctttaagtgctagggctgctgactgaggtttcttgacaaatagatcatggaaaatcaggacgttatatactggcctgcccaaggtatctgcaagaccagcccccttgtggaatcactggggcagagaacccacagctcaagctctcttttgatacctggggctctaaagaaatgtgtcagcaagtcttccaaacccaaaggggacaaggcttatctttcctggggagctcaattcaacagggaacagaaaacaaaagacagaaaccagccatttgtgacttgtttatttgattgtagccattaacaatcatgcattgaagaataacagtttcaaaacatactcacaagctgaggtgtggtgctcaggcttgcagtcccaacactttgggaggccgaggagggaggattccttgagaccaggagttcaataccagcctgggtaacatagcaagaccccatctctacaaaaaatttttaaaaattagcgaggtgtggtggtgcatgtatgtagtaccagctgctagggaaggtgaggtgggaggatcgcttgagcccgggaggtccagaatgcagtgagctatgattgtgccactgcactccagcctgggcaacagagtgagactcggtctctaaaaatgaaagtaaaaataaggaaaataaaataataaaaacgtacaatataatgttgagaaaaaataaaatataaaactgtatgtaacttgttttgtttatattcgaataatactttaatcagatttaaataaatatgattagaaagaagtctataaaagtgatactgacagtcgtcgtcaggtagtagaatctgaagttattttcatttcttttcatacctttccatatgttccagatttctgcaaatacaaacatggaatactttgctgaatagaatgtgaaagtttgctgaaaaggctgaagaagtaaaacaaattctgaatttccaatatggtacttggtcatagattgctctgacctgatttgcaagttctcaaagggtgcacactctgttcttgtctgagtcctaccagggccaagcatgtgcttcaaacctacatgcttccattgagatcctcctatgtacctaatgcatatttcaattgagtttggttttggaggatctgacttagtccaagttcatgtgaacctgcagagaaaagtgcacatgattggaggataaaagccattgctaacttttttttttaaccaagttgaccagttgttagaccagaaaacagttttgttgttgaataaacataatctcttcgttcatctcttcttgataagccctagaatggtgagatgactccctgtggctagcaatagaagatcctattaggcaagttttcttcaatcaggatgaaagagtcatacatattcaaaatgaacattttagaatatatagaccctttcatctccaggagggggttgtgtatccttgtttagatcttcattttacagatgagaacacaggggtctgaggaggaaaggggccagctcacatcccttgctgaactggcagtggatacagaatgtgaaccactgagtttttagggtcactgtaggctcccccttgccacagagataacagcgttcaccacttagataaagaaacttccatgctggccagcagtgggcattttcttccttctcccactcactcttcctgtaagcagaaataaggccctattgttatccaaagggcactctctcctaagtatgtcctagggcaccccaagatgatgatgttgtttgctagggtccactaccaggaaatgtcaagtattcgggattgcccacgaaagagtttattttggtataagaaaagatgggcttttaaaacttaaagtgaaaactttgggtttggaagggaaaatgtaaaagttggttataatgaggactttgtttgccaggcgccccagcccggtgactaatggctggctgcttgttggagaaagctgtctttaggggcgttgagggtgttagcaatgaacaggagtgggcaggcactgaggacccgggacccaggttaggaggcgggggaaggtggggtgaatgtgcaactccaatgagaaagtatttaactatggctccagtgtctaccaaggcctgtccaaggaccttggttgatgtcgctagagacaatgttgcctatcttcatgaaaacaaacggcaagtcctatcctgactcaaggagcagggtgttttggataattacaattttactccccataaactcctttaaaatggcatctaagagaagcgactttcagaaagaaaagaattctggggacattgttcctttcacagcacaaggtgaacaaaataagacagaaggccttctgtctcctgttcagtaaatttttctgggttaagattgttcttccaagtttgtcttcctggagtgcgtgagcctctgcagccaatgacaccacagtgtgtgttgtggggagttccagagtccctctccagttatcaggtcgatacatgtacctggtaatacaatgccaatccatggctaaaaatagcttccttttgttgcgatctcccagaacaaagggatcagacccacttcatctgtgtcccctgccctcccctcccggcagtcctaaggcaaacagtttgtcttttccctcaaatggatttttcatttaaaaatgggggagaatgaaacctgaatagcatggagacctgtgcactaacaaaaaattcttttgaaataataggtgctagaaatcacaatttcagcctcctgtgtcccccaagccagtttgggttgaaccagatgccaggacttaagtcaaatgtgtggggactcctctgtgggtcccttgggggaaactcaatgatttcttttcctttccttttcttttttttttttaagtgttcctcaaagatatacaagacgttactcctgataaaatcccgttagccatagttcaactttatattccttgatcagtcttgtgttttctcactgacttttgctacagtttatggctctagattaagtaccagaacacagagttttattttcctttgtctaagtctatcttcctttgcctggctcactaactggatatatgtacataggcgatgggcacagaatgtgggttgtattttgggtgagggtgggggtgggcaggtcggatcatgaagggacacagaatattaattagacagaaagtgctctctgtgccttatctgcataaagaaagataaagcccatgtaaataatatgtgtgtttcccataatgaatgtcccctttctctccatttctgcatagtattagaaattgcgtttttattatatgagacattggatgcatgccaacaagtttttcttttaacttgatattttgggctctgatctttgttagcactacaatggcatgtatctcgtacagtcagaggtcatttctatagctccttcccccttcccatcatttctggggaatgtttgttttcaaaacaaagaattgggttaaagctgaggtatcatatatcagaacatatttcaagacaaaattaagaacactcaaaccttcctttgaaaggtcagatagtatttattattattataaaaatgatctgtgatttatgaatttaacttctcataaaccttctttgtaacagaatatgcagtcagaggcttaacattacattgttttcttttgacaacgtatccacgagaccactgcagctgttcctgtactcacaatagcagattaattaacacaatcatatgctgttggctcttactcaatgagtgggtctgcagcgggatagataggtaaatcctttaaatgcggtggagataaagcatatactatggtagtttcataactagccagttttgcttctgactagccagccctatcaggaccaggttcacagaccacagacgccctgagcttgaatttcaaagtcagccacacctatcgccaacgccataatgcccaacatttgcaagacacaaatatgtaaaagccgaagacctctcggaaatcagcagctttggttaaaatagcagtcagtctgccgccagcattttgagtctgcagtatttttttaaagttcaatcattgctttccttaaatatctctcttgcaatattactcactttttttttttttttttttttttttttgcccatccctcagtgcacatagttctgggcagctgtcatgactttagtttttttaagtactaaaatatttttttttcttctgtaactgtgctaatgaaaacgtgtgtaatgaaaccttcctcccctgcccagtcaccagccatatttattggcaactttagctgacattttagggaacgtcaaacctttgttagagaaaatgtaaggctttgctttagaaacaggcatgcccatgcagagaacgaggtaacaaggcagtaggcttaatagaatttccttcagactttttttctaatgtccattacatatgcaacactaatttactttttgttgttttacttagcacagaaattgaaaatgtgacaagctttgctggattaaaaggctcatttcatagacacatagaccaagagaaagaagaaaaacaaatccataatttggaaccgtttagggcatccaggtagtagaaattcagtcttccccatcactcggggcatttgtcgtgggcctgagatttctctggaactgtctctgtcctttagaagtagataaaagtttggccatgtttggtcacagaagtcttgagtgctttggggaaaaaaatcgtatcatgatgttgaggtctctcacgttccacttaggggctgttcctcagcaccaggtcctggataagaggttcctgcgggggccagaaaattctagctagtgagcatcagggagatacggtgtgtaaagcatctctgttatgggttgagctcaagttttctagggtgctcctcatacgtggagtgtttgcaactcttccgagaagcacagagagcaatggctgcacagatacaaggcagcagggtggctactaaaataacaacaatagttaaaatattaatagcaacctgacctttcttctcaaccctgcccctgtttgcccatccctctcattcagctattttactaaaataataataaaacttccttaaaaaaaggttcagaacatgtgaataattagttatatgtagaaacattgcttagaaaaacctgaatacttgattctgagatcagaacagaattgacttggaaatctgcacagacagacaaggcagacagagacaaggtagggggaccgtaggcccctgggatgagaagttatgactggttcgttacagctaaggtcagtgtcccgacaagtggacactttgcactacgggaacagctattgccagaagcactgggctccttgcaaagttgcaggcgtcttgcttcgacttcactccgccattccttttacaacttgcattttgaaggcacctggtaaggctgggatgaatctgctgtctgaagggtgcgacaatggacttaaccagacttccaatgtgcaggcagtggcgatgcttctgacccagctcacgtggactttgggctcagtttctagtactgggtcagctctatgggtgccccatcctgtcatccctccttccttccatctaacctatggctcaagaacaggacccaaggacattgctccaaattaatgtccggggcctttttgagggtatttcagaacttaagaccctgtaatctcagcactttgggaggctaaggtgggcagatcacttaaggtcaggagttcaagaacagcctggccaacatggtgaaaacccatctctactaaaaatacaaaaatcagccgggggtggtggcgtgcacctataatcccagctgcttgggaggctgaggcaggagaattgcctgaacctgggaggtggaggttgcattgagccaagatcataccactacactccagcctgggcaacagagtgagactccgtctcaaaaaagaaaaaaaaaaaaaaaaaagccccctcagctgttctctatgaagcacatcagattggtctttgtgaatatttccaagattacacattatggccaaaagcctaactgtgagttaggctaagagtcagcagacccaggtcttggcttcactattgctgtggtattgggacaccaagtaaaccttgtaaacactacctttcacatagtacattacttaactggccttacccatttgtgatgcctcctcatagaaagatgtgagaatgcagtgagatgttggctataaggtataggctgagctgcgtgagaccctgcaagtgaagactccagtgccagagcaaaggacaggctaaggtccaggaagaaaaggaagtcttgtgtgcttgtggtgtctctgagcttgcagcagtatctggtactaagtcagcagttaataaatatttgttgaataaatgaatgaacagacaagtgtaggatccttatgctgttctaggaaaggaaaatggggaaggagacctggaaggaggctaagtcagcctctgaacaagcagaggcatgctggtgtttcgaacagagagaaagttgtctacagaatcatagaatcatctgatggagagatagcaggcaaatacaacctcttatacacatggagcgtaggcccacagggcagaagggatttgtccaaggttgcacatccaagacagaacttgggaccagtttaccaactcagtctcagcccagctgttctttatgggggtatctgaagaaaatccttttagccccaagtgtgcagtcaggctgggattcagtgtcaggcagtggttggggtcatggcaaagcaggaagggtgtgactcagagaagaaagacacaacgcagggaaagtcacagcaagagactccagtagaggccggggagggagtccagactttgtagcggatggtttcagtaatgggcagtggatcttatctttgtcagggtagtcaaaagcatcaggattcagttgcaatgataattttgtttcttgcttgtactgcaacagcctccataatgatgccagggtgtattcagtgcctggcacatagtaggtactttacagatatttgttggatgaatgtcttgaaggaatgtccactctccgggcgttcctggggaatctggtctccaggtgtaaggagggcttgagacttgggttgccttttccactgctcctggctctctgtccccataccctgtaccatgcaatgatcctgggccatcctggaagtagctcagtccctacaaactttctgttctgtctctggaataccctctgagttctcgacttgtcaaacttccacccatctcttaacactcagccggattgccagctcttccaggaagctttccttattgaatcagtctccacaagcagacattgtcacttctggggatgccatggtcctttgaaatgttgttttaaggctcttagtgtctcctgcctggggacaaaggagggcatatctaatgatccttctacttgtttgtcctgtcccatgccagagcactgagcagtgagctgagatttaatgagtatcagcagagggaactgcacaaagtaggtctgcagtgaaagtctgttaactgaaggaacaaatgtcttattgcattgctgtcggaattacatatggggaaaggcagcagaggcagttgggggaaggaaatgacattccggaggtaaagcagtagtagagatgggggggtttgggcagcacctgggccttctcaatgcactggatgctcaaggtctccagggatacaggtgagagtgatggtccggggttggcctcgagtagatgctttttatggtgagctagtcgagtaggtgctttttttaatgataagctaggtccacacagctacgaggggcgaggggcactgtgccactattctgtgtaacgtggtgctggcatggcatccttctgtaatagggcacaggtgacagtgtcctgcccccatgcacagcctcagctccagagaaaggggctgggagccctctgggggagcttggctcagcagtgtgatgctctttacaagagagatgattatgggccaaacagcaaggtgctcctccccctctactttgctctccttaaatgccagaggagcgtctgcaggtgctgacacacataccgagagacactggcggccacaatgcccatcggctgtgggtgtgcccctgggtgtgtgtatttaagggccccgtgagcggcttgagtcatcaatgatgctcttgaatggcaaattggtcagagttccacaatggtaatgatcactctgccggtgacctttctagtgcatttacattttatcacaacatgcacaagccacctataggcttcccattggctgggtcattcctcatgcacaataacccagcatgcagggacgcatccagtgtagatgagaaaggggtagcttctgacacatctcactctattgttgcatggtaatctttagcaccaaaggagacctttgagttaagcccatgttttcttcccttttatttttattttaaaaagtgaaggcactccaatgtgacatgcatccctcatgttaacagagccataaagatgaagcattggactcattgctgctcccacacatgtatggaactaaacccacctgagtggcccaaaaggagaaagcaagggggtgccccagggaagtccccggatcctgaattcttcggaactgttgtactttaagatattactttccaaaaagagatcaccttcatgtgtgtgtgaaagactgtgtgagtgtgtttgggtgtgggaacatgagtgtgtgaacgtggggtgtgtgtgtgtgtacattctcacgcttgtcatgcagaaattcagcctgtaagacccaagcaggaccagattccagagacaccctcagaagcctcacttcctgaagtttcagccctgtccccatcagccatatgtaatcaattagccatgtacctccatttgctcatttactcatgaattttgcatcactggagaaatcgcagtcctcttcagcttatagaaaattattaagacagtgtggtgattcctcaaagatctagaaccagaaataccatttgacccagcaatccctttactgggtatatacccaaaggaatataaatcattctatcataaagatacatgtatgtgtatgttcattgcattactattcacaatagcaaagacatggaatcaacacaaatgaccgttaatgatagactgtataaagaaaatgtggcacatatacagcatggaatactatgcagccataaaaaggaaggagattatgttctttgcagggacatggatggagctggaagccattatcctcagcaaactaatgcaggaacagaaaaccaaacaccgcatgttctcacttataagtgggagctgaacagtgagaacacatggacacagggaggggaacaacacacactggggcctgtcagggagtggggtggggggacggagagcattaggaaaaatagctaatgaatactgggcttaatacctaggtgatgggttaacaggtgcagcaaaccaccatggcacatgtttgcctatgtaacaaacctgcacatcctgcacatgtacccccagaattaaaaattaaaaataaaaaaaagtttcaaataaaagtcatagaaacgtcaaaaaatagaaaaaatataactgctgaagacagagaggaatgcattaaataagaggcggagtggctgtcacatccagggctctgggactctcacttggtccttgttgtctgggtgaggtgactgcgtggggacccatttcacagtgggggacaggagctcagggcttttgggtcagtcactcctaggtctgaggctgcagtcctccgggcactctaccgggggcgcaagtaggcagcgagcatgcagcgaggagccgaggagccgttccagcccgtgcgatcctgttcagctgaatcgtcactgctgtttccatttgagcctttaggtgacagtgccaagaataaaaataagcccggctattttcactcttatttggtacttctttttcttctttttttttttttcaaatgccattgaaatagaattctaatttttacttaaaatatgtcatcttaataaattgctacattattgcaagttgcttgatatatttaaagaccacctctttttccagaagagctcatttccaataatataatcacaatcaatagaaaaacattatgtttctatatacagtatctgctcttttttgagggcctatctgttcagataaaagaagtatttatctatttatgtatgtatctatctttgcatctatgtatctatgtgtgtaagtatgaatgtacatatgtatctatgtatgtatctatgtatctgtgtttgtatgaatgtatgtatatgtctatgtatgtatgtatgtatctatctgtgtttgtgtgaacgtatgtcggtatgtatcttctgtgtttgtatctatgtatctgtgtatgtaggtatctatatgtatatctacctatgtatctgtctatgtatccatatagctatctatatttatatgtatatgtgtgtggactcctaggatgtcataattttaaaataatatgactttatattttatcttcaaacatccaaattgtagactttgcatcaaacgtatttacacatgaagtgtcttaatacgtttcaaaataagtttcgtgtgattaccttcttttcctacagcagttgtctggacttctccagacatctgtcctctgttgttagcactccttaacctcaaggccaggaggagaaaggtcttggtgactcatattcctcttagccttggttaactcttatccagcaagggcttggtggaagtccatgttctggtggctgcatgggtcaggggcaagggagggatggtggcagatgaggacgaaatgaagtgttcctccccttggagatgtgtgcaagtctaagtgtgtggccccaccccactcccccacctaccagggacttttaggatccaaagccaagatagcattccctccagaagtactcccaagctcacctttatgccagctctttttaccaaagagggtaattttttctaaataatttcttagattattttaaatcgttcttctgggaacaggtgttttcttgggatgggcttgagttccaactgacatagaaggttcaggagaagctgcttctaatcccagggtaccccagattctagaatttcaccaagatgcagtggatggacttgggtctcacaatcccagtctcactcctggttctagaatctcagcaggatgccatgggatgaatgtgggtctcacaaccctgggctcactcctgtgtctagaatctcagcaagatgcaatggatggatttgagttgcataacttcaggctcactcctggttctagaatctcagcaggatgcagtgggatgggtgtgggtctcacaaccccgggctcattcctgggtctagaatctcagcaagatgcagtggatggacttgagttgcataaccccaggctcactcctggttctagactctcagcagcatgctgtgggatgaatgtgggtctcacacaaccccaggcttgctcctggttctagactctcagcagcatgctgtgggatgaatgtgggtctcacacaaccccaggcttgctcctggttctagaatctcagcaggaggctgtgggatgaatgtgggtctcacaaccccaggcttgctcctggttctagaatctcagcaggatgatgtgggatggacatgagtcttgcaagccaaggcttctcttggtctttaaatctcagtgaaatacagtgggattggtgtcagaggcaagggccacgagttcttatcccagcagtgctacctcctggctttctcattcagacccatgctttcttcgtcagtacaataggagtgtaccaagctctcttccaggctccctgtcagctcagagctttgttgaggctccttctggtgctgtttgggcattgttcaggattggagcgagaaggtttgacctgtcatgtagagtttcagctttcttaccctgggtacagagtctcaaacctacaaagtgggtatcaggggctgattactttatgaaaaggctcccatctacccccacaccctactaatgggattaaccattgaatactaaataagaaggaccaccactgcccatatttactaaaagctcaatatcatcatgctaagttctgttcttgtcttgtctcatgccctccatgagaacatccctcagtttcaagcatgacttctcattcctggttcatggaaaaggaagccaaggtttggagaagttaaaacttcaggtcacttgcttgcagtggtggatactggattcaacccagcattgtctgacatcatagctcatgctctgaaccactacacaagctgtacagaatggaaaatgttggctgttaagtccctatgtgttgggaacctggtttcctagcttttctggcatggtgggttgcatttcacttgtttttatgctggtctcccagcataaatttgacctcctttcatgggcctagaccctgtttccttcattggctgagcagtcaggagctcatctggtgaaagtaaagtgttcgcagatcttgcttcataaagaccagtccatactgagactcacacacctctgaaatgttcacgtaggtcagtggggaaatagaatttggattgcaataattatttatcttgcacagagctcatgaggaccacacaatggcagggcatgaggcacatcctatttgatctcaggtccttaacccattcatgcctgaggttgcaattttttgaatttttgcaatcagaccttggcgatgaccttgagcagtaggatacaaataactcccacatgcttagcattccaataatggaacactaggcataaatgggctaagggaggtagctcaagtgctgggatccccagggatatagctccaggggagacactttgggatactgagtattctggcagggaaacaaggtgagggaaagcaaattctaaaagggttgaatttactcagtaagtaatgtagactatgatatttcagcccatggacgaagttgacatacccatatctttgcctgaacgacccatctggtcaaatgccagggaaggaacatcagtcctaggtgttatgtctactccagggagaacagagcctctttacatgggcacttacagattaaatgggaatggaactgcatgttgaattgcctgtcttgagtctattagacctagcttttctggactacattgtaacatgcatctgcaaactctggaacaagggtagggctggctggcagtgtgggtgggaatggttttttttagctagctagcaccaggggcagtggagtagatatttttaaacttggggtgggattgaggtgaccaggggaagaggccctggaaatggtgagtgatcggaaagatcgaactgtgtatgtccaggacaagtccactgaggggagagagagggcagctgtggctggagactctggggagcagccagggggctaatgggagggcgttaccctaagtaggggacttatcatcgtctcatcaacctggacatttaagcaaagtagccatcagggacccacatcttctcaagatattttattttcttaagaaaaaggacaaaagtcctgagatgcctctattgcccctccagcaaactaaaagagcataagctgtccgcagagttctgtgttgaagggtgtcacacagcaagggagtaggggacaccagtgagatgtccctgagccacgggaaagagcttggggacactgctgccccctgtcccatttaaagttggatttctacctcactcttgaggccaaaataaaccccagatgtggcaaggagttaaatgcaaaacacaaaataaacagaaacacagggagacctaaaagaaaatagaagtatttttataattatggggaagggataccctctccaaccataacatctgagccagaaattctaagagtaaaggttgacaggttttacctttattcattttacttcttcatttaacacagtactggcaaattatgctactcaataaatatttgttgaatgaatttgactgcataaaaattaaatatttctaagcagcatgtgtgtatgcacacacacacacacacacacacactcccaaacctaaccataacatgcaaaatacagtatgacaacaaatgtttgctaaatacatgatagatgaagggttaatattcctggtgcaaagaaaaacaaagcctttacaaatcaataagaaaaagacaaatcctccaatagaaaaatggtcaaaggacatgagcaggcgattcagagaagaagaaatacaaatggtcaataatcaaagaacagtaatggaaatctttgcagccattaaatgtgtgagactgacctgtatttactgacttggaaaaatgcccatgacatattgttgaatgaaagaagtgggctacaaaacagcaggtagagtatgatttcatttacggaaaattatgtgagagtatcttagtctacatcttttgtgcaaaaatagaaacattctcaaagttgcttaagcaaaaaagagaatttgaggaagataagagtgcctcatcatccccttgcaaagtcagcagacatgtggcatcacccttgggtgggctggggtcaagccctcgtgggagtccctgggcagccaggcagccatttctccatcccctatctccctggcgccagagcatctcaaaactctttgcctccctctatttttctgattcctttttcccctctttgcaggccacctgggtagtgggattttgggtaatttttattcatttagaaatatatttctgtatggtttggggtttgtctttctttctttctttcttctctctctttttttttaatgaacgcgttatttttaaatttggaaaaagtctatatttttatttttaaagataaaagaaactccagttgggaagtgtaactgataaggagttaatatccttagcatagagaattttaacaaatcaataaagaaaataataccacaagcaaaaggaaaaatatggccacttaggagctcttatttagtgagtgtttactaagtgtggagaactacaaaactttgtacacacattctctcttcaacagctttaagaggtagatactattcttccctcccttccttcccttcttctttcccttccttccttccttcttgcctgcctgcctttcctccctccctccctctatccctccctccctccttccttccttcctccctcccaccagcctccttccctattttccttccttccttcctacttccttctcccattccctctctcctttcctctcctccttcctctctccctccttctctcctccctctttccttccttccttccttccttcctcccttcctttctcccttcctccctcccatcctctctcccttcctccctcccaccttccctcccttcctccctcctcctgcccccctctgacccactcatcctcccacccttcctccttccctctctcccacccttcctccttccctctctccaactcttcctctctcccacccttcctccctcccaccctctctctggccctctcactctcctgccctgtctcccttctttccattcttcctcccatgagtacccacccactgagcatctgcttcttgtcaggtatgttctgggctcctcggattcaggctgctgccctcatggggtttgcatgcctactctccccattttacagcaaggaagcctgagacctaaagaagctgtgacctggggcgccatttccgatgaggatgttatatgatccgcaaaataagaacacacagtttccagagaaagaaaaacaaatggcccatatgcagatgaaaatattttaacctgactagtaatcaaagaaaaaattcaaaagttgttttggtttactgatagattgatttgctcctccaacccaacaacttatgagattgataacaatgagtattgtatataaggttgggagaaaccagacactcttagtccgcccagtagctgtttatatttatacaaagttgaagagtaatttgggaaacatgtcaaaagccccccaaataagtgtctgcccattgtttcagcaattccctttttatgaaattattctctctatatattatattattatgagatatgttaatatttaatatatttattaatatataatacattacatattatatactaataaatattctataaatatatgttataaattttaatgaatattattataatatatattttatgataataaatatatattataatgatatatgaatgtatactatatatatggtataagatatattaagatatgaaatatcttatatagttatattatctcataccttatataataagatgtatcatcaataatctatattattaatctatatataatatatctaatgtatattagatagccaaagatgtttgaccaaggatattcactgagactcagtttataaagaaaacatttggaaacaatttaaatgtacttcagaaaagaatctgttgaggaaactatgactcctttactgtggaagtctgtagtttttgaaaacgatagcataagtctgtatgtttttgacatagagtcttactttgtcactcatgctggagtgcagtggcatgatctcggctcactgcaacctctgcctccctggttcaagtgattctcctgcctcagcctcccgactagctgggattacagacatgcgccaacgcacccggctaatttttgtatttttagtagagatggggttttgccacgttggtcaggctggtctcaaacccttgacctgaggtgatctgccctcctcaacctcccaaagtgctgggagtacaggtgtgagccaccatgctcagccaagattcccaatttttaatctcttcatctgttgattttttttagaaaattttctttaattttgttactttatctttataaataatataaatattatttatataatgaaatacaaatattcctatttacagcagcaggtagagtatgatttcatttatggaaaatgaatatggaattatggaatataaatattcctatttatatttcatgatgtattttccttgtttgtttcataagcagacaggaaacctggcataaaagctctggagggcattgcccttcccctcctgatgagattgggtggttgatgacttttctctatgtccctaaagttgcccctctagtttctttcagaggatgttcatctcctttgacaatgattcttgaagaaacaaacaaacaacaaaatctaagctagttgactaggagaagccacaggcaagaagtccttcttggtgtggtagtaacaagcccatctccactcagctgcgctgtttgaatgatgctgttccccagtttcatatttcttttaggtcccttaacagagacttctagggccccctttgtgctgaggcgaggggaggttctgccctggggaaagacctgcctgggaatgcccccacactgtggacattggcagatcttgcacaaagcgggcaggttgtgggggtgtggggtgcatgtgcgctggacccataaaccatcctgcagaggagaaacctttctttccaaggacggtctgccgagctgattgggcctcgagtaatccacaactaggttttattttgatccctttccccacaacaaaaatagcttccttgtttgggcttggtttaacctgattataaaactaatgtgtgatcattgcagaagggtataagccaaagatccatgtaaggaaggaaaatatcagtcttaactcttttgccctgagataatcattcttaacattttgctttatatcccttcaggcttttctatgaaaaaactacttatctaaatatcttttcattttcacaaaaagggggatcgtagtatacaaattggtcttgtgatctgcttttgccacttaataccctgttagtgaatattttgcatgtcaaaaatacagacctggctgggcgtggtggctcacgcctataatcccagcacttcaggaggtggaggcgggtggatcacctgatgtcaggagtttgagaccagcctggccaatatggcaaaaccccgtctctactaaaaatacaaaaattctctggttgtggtgatgcatgcctgtaatcccagttacttgggaggctgaggcctgaacccggatggcagaggttgcagtgagccgagatcccaccactgcactccagcctgggtgacagagcgagactccatctcaaaaaaaaaccaaaaaacaaaaaacaaaaaactgggaaacttgagctagaagtttatgtagagaaagttgagaaaaataagattaaaaagaatgcactttaaaataaactgttagggatagtaagacaatgaaatacaataaacctttttaaaagcaaacaaaaaagcaacttaaaatagggagagacagaaacttagagtttgaaaaagattaaaacttgacagtgttctagttttaaggtgtaaagaatagagaaaaagggttccaaaaacatatctaaaaggtatttaaaaagggaaatgaaacattataaaagaaggttaagagattactagaagataaggcaagtcaaaggagaaacaatcaagacaccttaagttggaggaagctaaaattataccaaatataagtatctaaagccaaaatattatgactattttaacccagtaggcacaaataagagacaatcaggcaggttgttcaagtgtttcatgcgcatacgtgatgaacccagaattgcccatgcttttttctttctcaggtattatcacatttagttatctgagtaattatttgattaatggctttcttccccacgagacttcaagatctgtgagggcaggatccttgcctgtttaacttaggagtgatgaatggtaaatatatgttcattaaatggaagaatgagtgaggcctctcccagaactcgttttccatggaacagggcctgtggcactgtgccccagcagtctggaaagggaattgctcagcaaaggggatggggctgtcggctccccctgcctcaccaaccactagagccttttaccattcaccgattgcccatggaagctgaattatgaccccaggcttgcaggggcttatgggaaaaagggctatgagaggtagaaagccaccatctaggcatggggacacccttgggctgccattgcagacccctgcctgagtggctttggaagacattctggaagggaaacaagggctatggctgtagaggatggggaggacctttcttctggtcactctccttcattcttcagtcccactgcctggggtatgactgggaccaggtcagaaaaggaccccattctgctgaaaaggaaactgagctgccacatggtgaatgacagatgtgaggcaggtttgatttaatgatccgggccatgagactgtgagtctttgcggcccacagagaaggctggaaggcagcagaggggggccaggtggagcagggagccctggtttaatttctaagaggcctacaacagagcacctaggtgccctagaaaatgcgttcactgacagcagtgagggtaccttcaaaattcaagtcctatctgccctacctcaccacaccaaccaggaaattaaacaaccatggtgcccttccttagtgactacatttgtgggtgtgggcaccgtggttcttttctcttttctttctttctttctttttttttttttttttttttttttgcgtcagggtcttgctctgtcacccaggctggagtacagtggcatgatcatggctcactgcagccttgacctcctgggctcaagcaatcctcccaccttaacctcccaagtatctgggagcacagttgtgtgccaggcaacacaggtgactaatttttaaaaaatttcttgttgagatggggtctcattgtgttgcccatgctggtctggggctcccgggcttgagtgatcatcctgccttgacttcccaaaatgctgggattacaggcatgagccaccatgcctggcctcaactgtgattttaaatggtgggattgagattttttccaaaagtaactgaaccaagaaggccagagggacaaaacttgcaaatcgagttatataatgtatacaatatgtataatatatataatatgtaatgtatatattatgtataatatacaatatgtaacatatattatacatacatatataactacgtatgtataagatatgattataattacatatgtattacacatacatatatgatatatattatatcttatacatacataattatatgtataacatattataatatataatgtatgcatagtatataatttatatataatatctgtataatttatgtataatatatagctatataatatatattatttgtgcataatttatatatagtaacatatatttatatataattttactgtgtatatttaaggcacacaacatgacattatgggacatatatagatagtaaaaaggttactgtagtgaagcaaattattatatccatcatctcaaatagttatcctttttttgtggcaagagcagctaaaatctaaaatctaaaattcatttagcatgaatcccacaatcagtacacttttcttacctacagttctcatgttgcacatttgacttctagacttgttcaccctacatatctgatccgaagtacaatggctattaactacttcatcaggggaagaagcagaagttggtggaaactgttgaatcgtgaatttctttcttcgttttatagctggtgaaattccatgttcctgtggtgggtagtgcatggcaggagccgagatcttgttttatcaagatgagtgggcctcacaaacaaatgatttcattctgttgaaaggcattatcactgcatctgacatgaaaatattgtggggggaaattagaagtggaagtttataaaatggaagtgtccgggggcagcctgcattcatatcaccgaaacttcagcatagctttttttttaaagatagaaattttgcccacatatacactaataaaaataaatctgtttccgattactaactatgcagccaggtgcttgtttgttatgagaaaggcatgttcattaattttcagctatgaaaagtgcactgtgccataaatatacaattcaaaatgtactgctgataaatgaatacgcagattgttaatgtgccagagaggggtattaggcatccagcacaaggcagacaggtacccaggtgatggggctggcactttcagacctggcgttccagcaaccacctagccagcctctgacagtctgtgctcctgtctttgggaggagtttgcacagcccctctttgggaggcttcaacttgccctgttttctctttattgtggcagattgggcagtgatagctttagggaggaaggcaggtggcaatgagttgcccgcagaggcattctacagagacgcggggatcgctgcttccctccttcatgatgggtcagtgctcctcgatgtagagtgttggccattgacctctcctctatggttgcaaggaagcagacatcagagcttcctggaaagctagaagtaggtggctctcagcccagatgcatcctcacctctctccaaggagaaggatatgttcccactgtagttatcctcatcgccttggactgggagacatgtcctgccttccctctttgaatgccgtcacatcagaagagtgacatcttcttgtccccgacctgagatgctgatcagcattgtagctttgcatccttggcaggacctgtgtctgctgccatgagtctgttgcccgggtcaggcgtagagtggggatggatatcatatctcccatttggcctcctcagaggctgagccctggctggagaacaaaggaaataacactctgaagtgtgggtggagtacaaggatgaccatcaccacttgagatcgtttcaagcatcttcagttttcagagcctgaatggaggggagccgtgggtaagatgggctgctcctggcagagcatccggaaggtgatgtggcttggcgaggctttttccttccttcccccaccagacaccttgcccagctctcagctcctgctcaagaactcttttctctggttcatctctcgcagcttggggctcctgactccttcccttgtctgatagaatgtcacagacccccaatatattttgtttacattaaaagctaatgcagctatgacgtgaaattttaatttatacacaaaccataaaaaagccttcaggttcatgaattcctgatgaggcagagactaacagtatattttgatatgtttacagtttatgttttccactaagaatatctagtttgtgggtctgtctggggtgctagtaaaagaggggaaggaatggaacgaattcaagcagttgtctcagccttcattgtgtctgcggccatggcagggtttgaaagcattttcgggtatgagctgaaatttgttgtactgcttggtggtaaacagacacgtaactcacccccacagcagacattaaagtgttacaaattaacatacacatgtaaaattttaaatataattaatttagcagataggaccttgcagttgtcacattattatttaagtcggatgcttggggtggctcagagcttacatgggtggggtaaaatgcaaggagaccgtatgcacgttaatgacaagttaacttgtgtctagttgagacaatcacgaagaattaaacaaagcttttagagggtttctggtgctatttatccttcccctccctaattttcataacatagatttataaaggaaattagaaatgaggcagagtccataaagggtccttggaggataatccatacatttacattaagtataattcgatgtatcatctacgtgcaaacttttgtctgcaaagcatatggcaaagcttttatggatatacagacttttattttaaacttaaaatgatgaaaagtttctgagcttcaggatcctcttactggtgactggagaaattgttgatcacatttttaaaattcagagaattagaaccataaaatatactgcaaaacacagaatttaaaatggttgtttttccaatgcctgcaaaattgttttattaggggactgcggaacacctgccttaaaatgtcgttcagaacatctcccgaatgtcgttttccttaattgacttggaaatggcccaaatgtattgctgaatgcagtctaattaatattaataataaatgccattattaacatcaaagaacatctggtgctcctgtttactctgaagccttatatgtaacacattttgtggctgtttcatcttgcaaacattgtgcagtaaacagtttttgccatgcaggtcaaaacagacccctgtccaagcataatgcattatatttaaaaaaaatcaaatattttctttgggtcacattcgttgctgtgatacgagtgtgggttagaggtcccttgagtaaaccattttgaaaaaaaaaaaaagtgctgctcccagcatctgtacattggctacattagagttttgtacaataaatcaaccactgaataactttaatctaaaatttcattaagtagttcttgtcaggtagtaaagctggataatgcagtgctgtttaatgataattggtgtttggttaataaattctgcaagttcgaattactttctagcaatctatagaatgcaagcctcagcagtgtaactaaacctcaaattgattaacttgcatgaaccaggcgttcacaaagatggcactattccaaataaaaaagagaacagcgcatcagccggatggtgttatgttgctctggagtaaggaaataaatcccctctgggtgcatttttaaaagcttatgcctttgaaatgatgtcatcatattttatttttttttcttttctttcatattttctttatatgtacacacacttaggtcaccagttcacaagacacgtgacacattagaataatggaaagcattttttttatatcatagaatcaaaaccacaaaacaatttagctggaaagtattattgaaagggcgccattaccagcaagctgctgctctctagcaattaatggaagcagggtgtggctagatgagggtttgctgtttccttcctacatcttgtgtgcgcaagaaaataaaatataagagccatttgcaagtgaaatcagcgcctaggttcttggagttgcgcttaggagtcctacatcccaggtgcaacgaccctgcaggacagcaggcacctttttctggtgggatttgtatttgggatggacatattggattaagtgcatgaattatgttgatcttctctgtgcccccaaccccggtgactcctgtgacattggtgtcattcaatcagcagtctgtaatagttccaagttaaaaataacatttattaaatgtcttgtaacacaagaatctggtctatgatgaagagaggaaaacaaggcatctaatatcagaagaaatgaaccaggctacaacagggacagacagggaggtgtgtctaccaggtcctccactctagactagagttgaagggtggatggaggatttaccccaaatgtgggactccagaaacacagctcccggtggtcacaaccaacttgttttggaggtggagcaaggtcctggtgggaagattggtggaagaccaggtgcttgggatgtgtgaatgctagaacattctccaccaagctgtttctttctcccctgcagatggggggattttgaaggattctgagaccctcaaactcagggctgagcagtttatcagcatctgtgtgcactgactggtgaggggcacgttgggtgctgtgtgggacacacgagagcccattggctttctgtgtgggggagcaatgcaccagctcagtgagacctggcgagccaggtcctgtttctacctgcctcagagtggtccttgacccgtggcaggctttgctttgcttttgaagctgagcagattgtgccaaatggcgtatgttttcaaagtgattcccctaaggagaggagcacagacctcagacacaccccttctactagcctccatagattattcaattgaagcagtttgtccacatccaactgggtggttagggagaggttattcaatttactcccaccctcaaaaaaatcaaaaagtctgttttcaccctgagcctccccttaatctcgttgatgtggcaggggtggcatgctgggtttcgcatgctctctttctgattggttttctggtaattattttacaatggtggtgtctggaagccagaacccctgggtcctgcaggggggtcaaagagactcacagggagatgagaaatggtgtgactgtgttggagcaaagaaagatgaccaagtagaagagtgaccagtagacgggaagacccagtgtcccaacctgcaggaggaccttacctctcttttccaggactttatgcagctcttctggtggcttttcttggggcatcaagaccagcttcttctgcttgattccagagggcaccacccctaccccaccatacctgcccctccaggctgtgcttccatgctgcatgcacaaagcacctgtcttggcctccacatccagaaactcttctcatcccttcatctccatattgtacttgcaacgtgaggacccctcattgttgactccggctctgggtagcttgcagagctcagtatcaggaatccagtgaccttgactccagtctgctctgtccttactagctgtgtgagcctggatttgtaattcaacctctgtaagcctcagttttctcatctgtacattggagataataaaactctgtggcccagcgtggtggctcacacctgtaatcccagcactttgggaggccgagatgggaggatcatttgatgagcccaggcgtttgagaccagcacgggcaacatggcaagaccccatctctacaaaaaacaccagaaaaaactaaaaattagttgggtgtggtgactcacacctgtagtccctgctacttgggagcctgagatgggaggatcacttgagcccaggagttcaaggttagagtgagttatgatcgtaccactgcactccagcctgggcaccagagtgagaccctgtctcaaaaaataacccaaaatataacaacaacttctgccccaaagggctgttgtgaggatggatttagacaatgctttgaaagcacatagaatgtgctcgattaatgttaactgctattgaagtagttatcgtttatgataagagttcagattttattattattatcaccattacttttagtatatttattttgctctccctggtgcatgtgaagcgccttcaggataaaaacctgaatcatcctcatgggaagtgtcccgtgctgttaggacagagtaggatctcagacagcgctctatgatcacagcagcaggaaggcacctcaggaagccattggtaaaacacaggggctttctcggtcttataccttagccagaaatccacagtggacaatatagaagcagatacaaaattgttcctggccttcctcttcttaatggaatctcccagaagtaaaataagaatgcccattgctctaggccaggcgtggtggctcacccctataatctataatcccagaactttgggaggccaaggtgcacagatcacccgaggtcaggagttcgagaccagcctggccaacatggtgaaaccctatctctactaaaaaatgcaaaaattagcagggcgtggtgggaggtgcctgtattcccagctactcgtggggctgaggcaggagaatcgtttgaacccaggaggcggaggttgtagtgagccgagttcatgccactgcactccagcctgggtgacagagtgagactccatctcaaaaaaaaaaaaaaaagaaaaaaaagcaataaagaaagaaaagaaaaaagaatgcccagtgctcagttgagaatcctacataggcccagagatttatccacagagagacaagggcagaagggaaaattgggtggacatgtttgctgtggtctaattgctctaagatgaatgaggaccatagagagaactaggtacctcaccacaagatgcaaacatcagccaggaaggacccaggtgcctcctttgccgtcctccgtcctcctgggcagcttctccctgcacggaccagccggcctggtgtgtgtctccacggcactgaacctgtgcagggcaggctctccatgaatatttgctggctgaatgaatgaactcaggggcaacaggaaaaggacaacgttcaagccaacactagggacataaacttaagtgagacaatgaggccagaaagtctaaagtgttttctgtcacttggtcagatctttctttctccttgaagaagccctatgaagaaagccctggaggagatgataatggcgcctttcaccacggaaaggtcaacccacatgtgttcattgagtgactctgtgggccagcccttcgctcggctctgttgatgattacgagacaggcaaacccacggggtactcttggtaagtaggctggaatcaaaacacatgagaaaaattagtgagcattccaaagcagcatgtcattgtatagaaatgttcagaaaaggtttagagacggagtgtgccgggaggccaggcgaggcttcgtggcggcagtggaagtgcgaggcttcgtggcgaggcttcgtgaagtggtgatgagaaacgcttgaaaggcagggaggagaaggtcgggccttctaaacttggagaagataggggaaggccaggtgtggtgacagatcccaaggccagtgcagcagtgaagaaatgtgtcactgtccccttggctcaggcccagccaccgagtcctgggacgtgatctttacatcgcctggttctctggttgatccatctttccctctgatcactgcccttcctcctggggcctttttgaaatctgactcaggttctgagcacacgtttcagcatttctggatgcaatttggtatcatagcgaagaatcaaagggtatttgctatcacttgaaagtctgtttctctccctcttcctctgagtacctgaccccacaatcatcactggctttgaaataacagacccatcataattacgagaattagtctggaggcttctgccttatttgcctaactgagattattaaggccgtttttagaggtggaaagggctcccaggatcatctcggctgagatggcaaattcagagagatgcctgcagggtgggggccagccaggtagtgagggtggggaaggggcccggtggggaggacgcatccactgcccagcccatcaacccttgctctttgggcccatgggctcagcattgggagataacacagtttctcaggagaagctggaaatgctgaccatgtgtgagtgaaatgtcccaaatttgtatatgttaaaaacaaacttatagcctgcgtgacatagtgaaatcctgtctctacaaaaaatttacaaaattagctgggtgtggcggtgcatacgccccagctacttgggaggctgacacgggaggattgttggagcccaggaggtcgaggctgcagtgagccatgatcacaccactgcattccagcctgggcaacagagcaagatcctgtctcaaaaaaataataaatacatacatacatacaaacaaaaaaacaaatttaacacatgaaaaccctgtgtgattaaacctttgcatctcaattagagtcctctgcccccattccatgatttgggggtgcaaacagaagccccgaaataggaaaggacttgggcgaggtcattaacgtggtgggcacagcgtgtacctaccccctcctttgccaggtccgcagagttatctacagaggtcagtctagcaccctcccattagcctgctgcttgaactgtctccttctttccagaaacttctgcatgccagtgaccagatcagcctctctgtggctttgaacccagggtgcagaagcctgatccagtcaatgctccaagcacggtccagccatcacctcgcagctggccctgtcacctcctgttgcaggcgaaggggcagcagcaacctggcagccctgggcagctggcaggaagggccaagcacttacgaagggtagcttcagtgttcttacagggtattaaaggaatacagcgagagttaatgcaaaactccttctttgacttaatttattataatatatgtggctaaaatgtagatcacactgctgtgttggatctccgttttgattcccaaaattgcaatcatgatagtggattataaccgtgctctaacacatagatgaggaaatgtattcctgtgcaattttccccgaaggagaagtcagaggataaggggcaggagttttgaataaccttgcaacatttagttgtctctctcaattataggatagaaattagcatcccaggatgatgtgcgtgtgtacgcagcaccgctttgaatattagtgcagaaggacatctgagggaatggagaaaatgattttccatatgaaagaaaaagtcactggtatcgaatcgagcaatgtgatgttgccttttattcagtaagtgcctactatgtgctgggcacctagctaaaggttgggggtgccaccgtaaaccagacagaccacaggtttgccatggaagtgagccttagcagtcagtgttgggtgatgcccaaaaaggagtgaaccagggcagagggatgggggtgcagggatgggggagctatgggagagcctggattgcaggctgagggaaagaaacatcccgggagcagcacgcagatgggaaagccaagtttgcttccttgttctggtggtgcgtgcagagcatccgtgtggcgggatgcccccaagaacatacatctgggcggactttctcctcaggcccagagactcagcagaagtacccaggcagaacgaacggcctgaggtgctgccccagggcctggactctgcagtctccaccagcaacggttcaaggccaacacctgcgcagcctatcgcgtcccaaggttctgttggcccaaatcaagccacctgcctcccccagcccagctctggggtggggctcccaagagccaccagccttgctgcaaaataggattgaatttctgtgtggatgtcgagccctggctggggcaggtgtggacagggaagggccctgtggcaggagggactggaagctttgcacagcaccttggggcaggtgaggctgggaagaccaagctgacttctccttgccctccacggggttgtgctctggcagtgggagccctgcactctctcaaggagagcctggaggagctgcagtctgcagctgcaagaggagggggctggactgatggaccacaagggaatggagccctgggataccagacaccagattccccacgtccagctttccttcctggagagagcctgtggcagcctgtccactcacagacacaggccacctggacccactgccaggccccacaccctggaagggcaggtcagaggtggctagttatgtacttaaaaggaaaaggcagacttcttagattgcatgatcatggaagggtggccagccctccccaacaccattcattcattcattcattcattcggctggtcaccagtatttattgaacacactgtgccaggaggctctaagggacacaagagtgagaaaaacagaccccatcccagccttcaaagaggtggcagtttggtggcagagacagatattaatcacacatatacgctcagtgcaaactctgagaaatgtcctgaaggttaaattctgggatgattgggcagacctgacttagtctggaagatgagagcaaatgacattggagctgaaccctcaaacatgagtgggattaaccaggcaagatgcaggtggtgggcctggggctggtgtttggggtttgcatttcaggaagagggaacagtatgtgttgagattctgaggtccaacagagagagaaatttctggcccggtgggccagtagggccagctctgggatttttaaggcatttcaggatgagaggaaacatttcttagatctcattgcagtcccaagttcctgaagctcttaaattctttttcaatatcagggcatgtgttctcggggtaggggatgagccagccagggggcttcccgggtgcaagcccccagcgtgtaggactgaagggccctgggacctgtgtagttgtggatgaatggggagctctttggagatgttgagagaccaatgggatgctgaggcctgagcttctacctgctgtctgcttctttctccctgtcatcccagtgcccacatccccccaggtcctcatacccccaactccttcacctactcccctcaaaggggtgtttggaggataataccaagtaagctctaatttctgggttagacaatgtgggagagagtgaagatgtgttatgtctacatggagttcctactcagggctcggtggtgcttggcattaggaaaccttgttgatcatgcagggggaggggctgaccattttggaggatcctatggtgactccatgacatggatcaccacctgctggtttgctgttttatgctggtttacctttttcatactttagaccttgtagatggtggggttgggaggctaccaattgggactctgctggatgaccttttgtccacagtaggaggccttattcccatgtcataggcagtgtttggaggctgggcgaaggtaggaggcatttacaaacacacagctcggaagtggcctcaccagacggagcccagagccggccattgcctggtcagtggcttccccactctgccacgcagggtttaaagtgcatgcagctttgcaagcccattgcctcatgaagcactcagaccctctgtgactggcaccattctccagtgatccaactttaccaacaaggaaatgaaggctcatgaagctttggcgctttgctcaggaccacagagccagtgctagcagagtttagattcagacttggctcccggagtcccttggtgttttgaggtgctcgaatgcccaggcaagcctgttcaggcagcattaaaagtggcccgtgtgtctccctgtgttgaggaggattgggccatctctgtgcatgtctgggggctgtggggacactttgctcagctacctgctgctccccttccctgaaaagcaagggctgctattcttgcctgcttcttctggggggcttgttggaggacacactcatcttgggatccttgtctctggtctgaatttctttggaccagtctatgggattcccagactttgggaagttcccattgagaatttgccagacttgttattttcatctgtgatcacaagaaaaacaagcaaacttgaccttcctcctggaagctgctacccaggaggctagtcctggagctaggtcagttcatttattaaagcattcatttattcaccccatttggggtgaatattggctggacaccggccacgtgcaaagtatggaggaggaggaacctcagcccttgtcctttgcactttacaggctagaaggaaagctggtgtcaaagaagaacaaaattcaagccctgtatctagccagagaagccagctgggggccacttgggatgggaccaggtgctaaccgcggtgataactgggagtgacgtggcctgacttataatcaagaaaggtcacccatgtggatatatcagaagaaaacaaagttgcctctcaggaactaccaggaataaatttacactcctctcagtctctacaaggggaaacacagtgaaaacttagctaaaagtgtcacagttgtattgtgtaaactacactgcccttcaagcagcatgggacatcacactgccagggacacgaacactggaccgggagggccattcgcagggcaccacccagggcttctgttggtctgcaggtaccaagacaatggacagtggagtggcctcagctgtctccttggctcctctgctctgtggcctgagccagacctgaaggttttgtcctttggaagtccaccagctgggaacaggtctccagaaagatccatgtgcctgtgcctgattggcagagctggatatatatacatatatatatacatatatataatatatatataattttttgctaattttaatgtcaactgaagtatttattactacaagatattgaagggttcagcatttattcaaaaaaattttttaagctgatccaaggattgcgttcatctgatatgttctcaaatgaaaagggctagataagtcagtgcagctcaaaaatggcagtaacttcagagctggcaattgacacttgttttctgccactgtttactcttcaataaaaaatgcatatttaccatagcaacctcctgatcacgtggagccctatcctacatgcgaccctctaaaacagaatagcttcttaaaggaacacacacatcctaataggcatgcttttcagatgcaaaaacgtgttctttataaggaagccctctttcctgggatttagtgctaataaacatgtcatccttgtagaaatcattttggtcccctgtcttaaattttaagatgttcattctggaaatccaaataaaattactcttggaggggctttcaattatcttaaggatttgttgattatttattttaatatggttctaaatatatatatttgtgtttatacatgcacataggtatatatattttaaacagcaaccgttagtatcatctggaagggagtttggtgcagattctaacgacctgccgcttcatctgtgattaaagattgtcatctatgcgaagctcagtggcagcctgaattgttttttactgttaacttgggaggattgcctggggttttagagctttggaggagctgccccaactggacttttcagggaaggatcatgtcccctcatgctggcactttgtatgtgtctgattccatagcttggagctggcttggggttggcgcgggggcactgccagggacacgaacactgaaagctgctactcaggaggctagtcctggagctaaaaccacagatctgccccctccccatgccatctttacatatgacgcgttgctttggcaatattcatgttgaaagccactattaattggagcataacctccatcaggcaccatgctaagtgatttatataccttagactctacaatcctttgagacatgaattcttgtgactattcccgttttgcagataaggaaaccaagcctcagagaggttatgtaatttgcccaggattacacgcctaagacctggggaacttggttttgacctggggcttttggactgcaaacctctccgcttattctgtcttctgaacctgtctgtcagatttagctctggaaggacaagtggcgacaagatggagaagcctttggagatagggacagtgacagtggcttccctctcagaatgcttcctccagagattcctgggtactctcagtttcagcagagatttgtggaactcttttcatactctgatttttttttttaatgcctgcacctggcagtcaggcacccttcccctgtgctgggctgaagtcagggctggagtgccaagggtctctggatgccacagccccagggagaggtggtatggctgtgtgaccacaagtgtggtcaatgcctctctgaggcaccactgtaggctaaggaggcatcccagccgggcctggtggatttttagtttctttcaatgtgagaaacaagaacgtatttgtgagtctgttatgcttagtggctttggggcaaaatccgattgtgaagtgaagctgggttctccatggcacagaggcattgtgacctgcactccacggaggggcattgcccccaccccgtgcccaggccagccaatccgacggcggcaggctcacaagccatttcataattatccatcacgaatgcctccatgccgccctaatagattatttaaaatggtgtgtgtgtctctcatgcaacctcaagtcagccccaaactgtacatgcgtacagcctgggagaggtaattgtttatcatgtatctctttgttgcagacacttttataaaagagtatgtattatgtatggtgtgaccttcaaatgtcaggaatgtgttttgcaataaactgtcaatatttgtggttataaggtactagatgacttttacaataattggaacggctatattaaaagctgggatcactcggctggttaaagagaaagacacaggccagcgttcatcagggacttgccttctgccaactattaaatgaaagatagtgcaaggtgctcaagatgtcttctttgtttaaaaaagaatatggcaagacacatctctaggggaggcgttatctccaaatcatcccttctcctttcagtgtgctcaattcccaggagaaaactcaactccgcaagttatagtgactgaccaaatacattttaaaaaagattggtccagtttgttcctggtgtcatttaggtaagaattcctggagtcagatcttccatcttctcccctcctccacccccacccaaacaggaggggctgtaaattatcttaagaggatcttaaaagctatagtgttctttttttctttcttagtaaaataaattacgtagacatcttttgggaatttatgctttagtgaaagtagaggcttatactataattttcattttttgtttaaagaaaggagtacttaatttaaattatgaagaagcaaaggcataacaaatattttattataattattatagtaattggatcatagattacattaaaaatatctgtttcactatgctcttctatgggtgagtatctctttatgcttatgtgaagtcgtttctccttatgatagtcagatcttcgtttttaaccaggaaggaattgagtaaatgaaatggggaaaggggcctcacactttagtcttctaaggagctctcttgtggccttgctgattataattgtgtgtttgtggttccttccacctggatggagggagaactgggtgacaccctgaggccccttcctccaggaagcctccctggacatccccaggcctcctcaccctgcaatcatccaactccagcacctgcatgcgctgaacactctggagcacttccgatgttttgacggtgccctggactatttctccccaccagctgctcaaagtagcttccctctcatagtcaggaactggtcttaatatctgaattccaacttgcttgccttccctgatgcttttatttgttgaaaaagtatttataaagcacctgctatgagctgaggacgtctcgcatgctagaaatgtcacggcaggccatagtgcctggcccctgttctcctggagctgacattctaggaaggggacaggcagtgagcagtttaatacacagatcagctgaccatctgtgaagggcgatgtggaaggtgacatgggctgagagctgggggttgggagatttccttccaacagtgcgatcagagacaatctctctcagagaggtgacttttacacgaaagttagaagagcattctaggggaaagagaattccaggaggaggggaagcaggaccaaagccttactggagaagggacgtagcctcagaggagaacagaaagttgggaaccagcctcagaggagaacagaaaggtgagggttggagtgcaggtggggagttgggatgaagtcagagcagtagggaggccacctggacatattgagacacagctggaggttattctaaaaagcaatgaaatgagtagctggtccctgccctgcccccaaccagaggctgttcccaggagatggcagcggcctgggctgaatctctcagactcattctcctgcctgggtcttctcaccaaggccaggttcttaggtgaccctgctcagcgacacgaatggtctctggggtgggctccagcccacagtccctgtcccacagagaagagacaggtgtgcagagcccaaagagacatgtcacacctgatgtcttgtcccaggtcaattctgtgaatcccaaaccttgcccgctgcatccagggttgcagtctctagcctggggactgagagtacctgcccacagccagcccatagccaccccttggggccttggcaagatgtggcggtctgcggatgacaggggatgttgtcacagcagcatcacatggtgccagagggcagagaccccatgggtggcctaatccccagcagggagtttcacagactccaccaacaattaagaacaggttcaggggccgggcgcggtggctcacgcctgtaatcccagcactttgggaggccgaggcgggcggatcacgaggtcaggagatcgagaccatcccggctaaaacggtgaaaccccgtctctactaaaaatacaaaaaattagccgggcgtagtggcgggcgcctgtagtcccagctacttgggaggctgaggcaggagaatggcgtgaacccgggaggcggagcttgcagtgagccgagattgcgccactgcactccagcctgggcgacagagcgagactccgtctcaaaaaaaaaaaaaaaaaaaaaagaacgggttcagggcttgggaaaaccagaaacacatttggcccacagttcttgatcttgaagccctggtatattttaaggaaaatgtaatccatgtgtttctgattcattttcacttaactcatcaaaatgttgctttagagaaggtatttgaaatcctagtgtcttatatttctccctttttctttttttgagacggattttcactctgtcacccaggctggagtgcagtggtgtgaactcggctcgctgcagcctccgcctcctgggttcaagcgattctcttatctcagcctcccgaatagccgggactacaggtgcctgccaccacacctggctaatttttgtattcttagtagagatggggtttcaccatattggccaggttggtctcgaactcctgaccttgtggtctgcccacctcagcctcccaaagtgctgggattacaggtgtgatccaccacacccagcctcctttttttttttttttttttttttttttttttaagaaattagccttttgatgacctacttccccaattccagaaatcgtctcttgccaccagcaaatggaactctgcccagttttgagtttgggtagagggtgagacatggcaacatggaaaacatgccacctctctatctcacgtgtcccagggctcaccagtgaggtccaatcccgaccccgttggtaataacccacgagcaagctgcctgttgcctcctcacaagtggacatcgttttctaaaatagctctttatttaaacaaatactttcaccaatccataagaatacttaactgtttaacatgactatatatggccaccataaaattgagcactctgatgcaaccacagagacaccaagttgatactgacccgaggcatgagttatgtcttctaagagttaggtagaattgtttacagtaatgttataattttcatgcataccattaattttaaataattaaaaaaaataaaagggccagttgtgattgctttatttgagtctattaaagctttcaaaataagggaagtgttaagcttttaacagtagctatacattcctttggactttccccaaggtgtcggtattatcttgctcctgaaaagatcttcaagccctggcatacgtgggcaaggacattaagaaagatgtgatttttttgttgttgttgtgccactgaactgcttcttcaccccttagactccacaaatagttttttttcttcattaatgaagtgagagctgtgattttgagacgttctttgcacaaagcatacttgcagaattaactgacaactcatctgggaaaatgtatttactgttatactagaagctccatagaaattaaaatatcatggcatttgatgccataaacgtagtaagcgccagggtgttcacagagttagtcaccttacccatgcgtgcttgctggggtaactctccagtcaccatcatcattgccaacagcatcatcattataattttttttaatggaagtctttccaaaatgtacttctgggcatctgaagggtaaggctgccagcgagttgggatgaagcgagaaccaagaatccacatgcaatataagaagaagtcattctttcctttctctttgtcctctcactctgcctcttttggtttctatctctggcttctccctttcattctgtgagttaattggactccctggaagattggatataaacccagaagacttcaccagtagaggattgactcttcttagtcaatttctgaccttttcccacaatggctacccccaacatctctatggcttaatataaccaggatttgtttctcattcatgcaaagtgtgatgtgggtcagctgtcatccatctggtgactcagtgacccaggtgccctctattttgtgattctgttgtctcaacctttgcgttgcaaggtcactgtggcccaggaggagagggcggaggaggtgcaggcacactctgtcttcatttccttcatctgttggccaaaactgaccacctgtcctcagcttagtgcaagagaagttgggatacgtaggggtccagggactagttagcaaccatttgccgtcctttttacagtcatttcttctcgcctctttaagacccaacatcagtatcttctttggctgtagggtggggtcagcggggagaatgagaggccaaaaaaaaaaaaaagcagcgggcagagacagcctgggataggcttggagctctttcagcatggcgggacccggaggtctagtcctcgtgggtcagatgggaaccaagggcgaggggaggggtgaagggacttgcttgggatagttggatattagggacccgggaggaaaagattctgcctcctaacgcctgagtcagcatttttggaaaacaacgctattttattatacaaagaagttcagtgtttagagagaatctagggggaaatctacccttcaagtacaaaatcattttataaacaaagttttaatatcccaaacatattatatataaataaggttaagtgtgtgttgaggcacccatccattcaaatcatgtttgtatacagcaagatagccaacctcaggggtggtttcagacagctggtgacagtgttttctaagtatcggggctttaacttttgagaagttgtttgtctttctgagcatccgtttctttgtctaactggtactgccgctttgtggtccagtggatgatgaggattctaaaatgatccgtagccattttaatccccccaactccttcagcccacatcccctcctctgaatacttggggaaagcatgcaccttcatgtcaccttgatcgaggccaaccttgctatagactcggaggataagaacaagcgaatgggcatgtagacaacattgctgaccttgagaagacaaaattaggaaggtctgttgcctgatgtctccttgttcctggtaacagacctttaaaaaacttggatccacctcctttttctttagcaagtcactttcagcttgtaggcacgggcagaggagaaagctggcagagcttttgatgcctacttcaacacatttgctcttggctacagtctaggagggttgcaaatatggcctgtgtctgcctggaatattattcgttgtacccatgcaaggcacccacatctgaagaaataatcccatattattcagtggagtcaagaaaagaaacaagggccacaggagctgtttctcagctgtttctccatcaagtgggagcccagagcacacccaggctgagggtgcattaggcaagagagggcctccccgcctgcagccaaaggtcccctccagggacatctcagtctctaggagctggcaggggtctgtcatttcacagatgagcagggaggaacagatggcagcgttgaggctgacctctgtccacatgtctgccttcagtctacccagcacattagagaaagtgtcacataggagggaaggaataccactggttagaggaaaagaaaattaaaaaattaaataaatctcaaaccaatgcacgaaaggtttaacaaaggatcacagatgcaatttttgtaatacctctctctctgtctttttgttgttgttgttgttgttgttgttgtttttgagatggagtttcgctcttgttgcccaggctggagtgcagcagtatgatctcagctcacttcaacctctgcctcccaggttcaagcaattctcctgcctcagtctcccaagtagctgggattacaggcacgcaccatcatgcctggctaatttttgtatttttagtagaaatggcgttttaccatgttggccaggctcgtctcaaactcctgacctcagatgatctgctggcctcggcctcccaaagttctgggattacaggtgtgagccaccatgcccagccaatacctctgtctttctactgcctgcttcctggagtggctaggaaagggctggtctgtctgcaacataaaccagtgactgctttctccacctgatgttatggggtgccaggagaagtgatgggactccctcctgcagtttgcagaggggcagacgccagtgcttttatactcggggtagagaaggaatccaagagcagatgcacgttcccctctgaatgacactctcaggttcttgctggggttgggccaagttcagcacacacatcctcaccagcacccatcctggcacaggctggggctcacgcacagtgccctgcgggtgtcctgccagcacttgctcccccagccttcactgtgcttggctttcagcctctctggacacttcctgggaccacccacgatagcccttcatcttctctcagcatgattttccagtaggattagtctaaccataaatgccataggccttctggccctccaaaaaaaatcccttttctttgtgaagtaataattagactcttaaatctgcaaagaaaactgtttatcttacaaatttattctttttattgggccacacatatccaagatagaaagataaaaggaaaacagatacaggccatcacttagagtgatgtatagtgaggcagggctcatcctcaagttctgcaaaatgttccacagtgcagggcggccgtatcgctatttttatctgtaatgtggcctgggcaagtccttcccaaaagctccaggagaaatatgccctctctcatttctcctgcagtgtcttcttttttgtgatttttttttttttgaagattcagggggtacatgtgcaggtgtgtggcatgagtatattgcgtgatgctgaggtttgaacttctaatgatcttgctgtctaagtagtgagcatagcggtcgataggtaatttttcaaccttgctcccctccctacctcccctgcccttggaatccccagtgtccatatatatttttttgagacagggtcttgctgtgttacccaggctggagtgcagtggcgtgatcccggctcattgcagcctcgacctctcgagttcaagcaattcttgtgcctcagcctccccggtagctgggactacaggcatgccccaccacacccagctaatttttgtatttttagttttgccatggttttgccatgttgcccaggctggtctggaactcctgacctcaagtgatctacccacctcggtgtcccaaagtgccaggattacaggtgtgcaccaccacacctggcctccagtgtctattgtccccacctctgtgtccatggtacccaatgcttagttcccccttataagagaacatgaggacattctcctgcagctttattccacagtggctccttgctactgctctctggcgggctcctctggaagaagctttatgggaaggtccagagcatgccacaggaggccccgcaggaattacccttctttttttttttatttttcatattttgagacagagtctcactctgttgcccaggctggagtatggtggtgcgatctcagctcaccgcaacctccacctcccaggctcaagcgattctcctgcttcagcctcccgagtagctgggattacaagcacacatcactaccacctggctagtttttgtatttttagtagggatggggtttcaccctgttggccaggctagtcttgagctcctgacctcaaatgatccacccgcctcagcctcccaaagtgttgggattacagacataagccaccatgcccggcccaataattacacttctgaaacctgcccctgcctaccttcatcctgaagccaacatccaggacaccttagtcctgcttataattcaaatcaacagtgattggcctcctaacttaaattaggtatctcgactatgttgccaggagcacttgggcagaattttaatcaggctcatcattatttgaagctgaccttcatgattccagcaaaagggaagctgagggaggccgggagggcaaatgcagcatgctcagggttggggtgggtgggagtgggagaagggtagaaggagatggccttgccactgtctaaagctagggtatgtggttggctggaaatgacatctagccatcactccttctggcagcagctccttgtagattcaacctgcaggacatagagccactgtgaccatatgtagagcatttgtctgatggtgactttgcaacactctcttgtgtccatttgccctgatcaataagccatctttgggggcctttccacattcatttgggcaaccacaatctagggcttggtggagtgactttgagttctagatgtggatgagcctaacttcctacttgtgcaaaattataggaaaaaaaagctaggtaattataccctttgaatagctctccaatgatggttagaagagttggggagaataggattaaagtgagatttcaaatataaataactgtgccagggtgatgatatggtcgtacacagtccaactgcagagagaatgctccaagccaagagtttccacagttgcttagagcgaatactcaaataagaattaaatgtctcggacccagtgtagtggcttatgcctataatcctagctctttgggaggctgaggcggaaagattgcttgaggccaggagttcaagaccagcctgggcaagatagcaagaccctgtctgtgcaaaaaatagaaacttagcaaggcatggtggcctgcacctgtaatcccagctacttgggaagctaaggcaggaggatcccttgtgcccaggagtttgaagttgcaacaagctgtgattgtgccactgcactctagcttgggtgacaaaatgagacgctgtctcaaaaaaaaaaaaaaagaattaaatgtgttgtccttcatctttctcatggtctacaagtctgccgcttttggctgttagcagagaacaccaggaacagacgttgaggaataaaagcagtttgcattttccattgcttggaaggcacagatcttatttattgtgatctctgcagaacccgcagatctcattatcccagaaggttcccttgttctcctagtgggatttaccatgaggcctagagggtgggctggaagctacggtgaggatcaccccgctatcctcaggagcttagattctgtgccaggccttcaggctcctgctctgtggggatgtccatgattctggaagaaaagtgagcccagagaaggttctcttgcttctcctcctcgattccccaattgtgacctctttggcagtgtgatgtcaggcctcgggggctgcaataacatatcctccaaccactagacatttttccagttttatttactattatgtcccacaatttctttgcagaaggcagccatatgtaaattttattccgttttctaatggtttgggttacataacaaataacagcaggaaggaaaatttgtatcgatacttgacagaggaagttctcaagtcactgcaaaaagatgtgtctgcagtgctgtaagtttatgggagttttgcagctgagtctctgcatatgactttgaatatgtcactatatgtttatcatgggctaattgtggaatcacatttccatactttttcttctccctttcatgagattacaccagccagtgatggatacaagactctacaaggaagaaatgatcagttttggataattttctttcctgtcccaaaatagccatatgtctgcatgtcttagggactcagctgacacacattttttttaatttgttgcttgctataatgcaaatatgatttcagtcccatagtgaactctacagtgagtccatattataaattaatcagattcaacaaacaccaacatttttaaacttttgaaaaaaatatttaataggaactaagcaaaagaagaaatcaaaccagctgctgacacagctgtttcttttcttgtttaattcagttcaatataaaggtaccatatgctgcttaaaatggtgataggaaagatgaaataatttaagagaataacaagaaaatacatgaattgtcagcattctgtcagatttaaagaatgaaatagacaggtgtagtattgacatgtttaactttgtgtggtgttagcagttttggtgcgaacaactcctgacatgtgctgaagtgatgtgagaacgtttctccttcgctgcagacattggcgaggaggctgggagatctgccggcgtccagcaaccagcgctgcttcgcgacagaagcctgggctcggccatgaaggactgcccgtactgtgggaaaactttccggacatcccatcaccttaaggtgcacctgaggatacacacaggtgagaagtctgagtgcatccaggggcacagcccagagaaggaggaggtccccgtcctgcctgctttctggcccaggtccacagctgtgtgggtcactaactctggaaggttctccctgggcctgtctagccaccattgtatggctcagaagcggccctcatttcctgattcgtcacttaactaacattcacctcgcaaatgactcagggactcgtaaatgtagacttggatggtcctggcctgggataactgggtcgcgtctgagcctctagggcgttttgctaatggtttccttctgctgtattgaaggagtccctccccaggcgcctgtatgaaccaggagtctcccaggtgtcagtgatggggtctcagctcaaaccttcctaagtgcagaagggaatgaagccacttccccaagcatccaggtagaataggctttagcccagcctgtgttacatgcccagacctgggacagggcagctggagtccatcctcgtcactccatgtggcgtggtggaaaagtgactcttccctgtatctcctcaaagaagaaattgagatgctcttaggcaaaggggggcaagtggctgctgcacccctctggccatttctcatgttttggcgtcatactggacgaggactggctggcaacagggagttctgtgtgtccctcagtcaccgtcctttttagctttctgcttgttgcttgcacattgccaatataaaaaaaaaaatctatcggagatatggacacttccattttctttgattttcctcctgacactttatctattggagtatgagctgcttcagaggctagacaaatatgccatctattttcaaaaataattgtggtttatttcccaaggaatcaataaggctctgggttgcacaggaatattgagtgcacgcgggctgcatgggcatcgcgtggggggagacaagaaacccctcacctggtgcctcacctggtccccacaaatctccctgacaccgagggaagcctgaggacagatgggcacaggaggccatgggccgagtcaccagccctgttcatcctgcatgcctctcttggagtcatctcaggccaaagaggtgtcttttaaaatggtcctccaggtcccaccactctcccaaaaggcctcatgcgacctgcccatgccttgccccggccccatcctgcccccttcttcatccttggcacctttctgaaacaccacctgcattctccctgttcttccaatgcagaatgcctgttccagctgcaggacctgtgttcctgcccctccctccacctggaatcttcctccaggtggtccctggggacttagctttactgggatctattcggagaggctgcccctgactatcccacctaaaacagccctcacatcccctgcaattatcttctttataaacttaacaatttcagaaatgaccctgttgggctccatcgcttatttgtctcccaccaaacagagtctaagatttgcacaggtggcaatattgtctatcttttgaattgctgtcatttctataaccccagggtctgcaagggcactttacacccagtaggggcagatgaatttatctgaaaggttgaatgacagaagaaatgctcaaataagtgagtgactcctcctgtcttccctgcattgttcaaggtggcgcagaggagtcaagggctgtagggaaagtggccccttccccagggaacacaggaacctatcagaaaccacagcctgacagtcaggctgcaagtgctggttgcttgggcatagacaaagtggaagatcctcttccccgggagttcagggagggggccttgcattctgaactcagggtctttgccctttgaacttctctgccagatagttgcatggcttgctgcttccccttcagagtctggctctgatgcccccttctctgtgaggcccacccacatggcagtggaccccccgccccaccaggactttctagaccgctttccttccctgtgtcacttctctccatagtgctcacagcatctgacacaccatgcatttgtatttcgttgttgtttctctccatgcactagactgtgaactccttgagagcaaaggctgtgtctgtttgtccagctgtgtccccagcctagaacagagcctggcccaggtaggcactcagaaagtatttgctgacccaggcattcctgcgtcaattcgtgaaagtgaccaggctcgaaggcagtcagcccagacatctggttttctcagatgatgccaatgtccattttcctccccagattggagccagggttgtggtggtggttgggcagggtggggacccgcagactgccaggatacgggaggtggtccacagggcacccatgcttgagctgcctgcaggagtgtggaaaccaggctaggcatgtcttgtcttgtgtatttcatgtcgacacagaaccctggaccacatttcccagccaggtggtaactctccatgggtaacgtcagccttgcagggtgtaagagtcagtgaggaaaggcggtgcctctcaacgaggggctccactaaccctgtcggcccaagaccagtcagcttcccggggggtaagagaagacactccacagaatatttccaggcaacttaggaccaaagctgacagaagttctggataacctgggagagagcaaatggttattgctcttcgcagttttcaagcttgagaaagactaatgtttctgaacttctgcttcacaaaccttggaatactcttcggagacattgagagagacaacatagggccatggacagaggcattctggaaacttcctagaatcagagagaaaatgaaagaagccatggaaacatcacaccacctccaccacccctcggaagcagcattcgccgtatgtaaaaggcagaatggtaaccagataaagatcaattacctttttatctaagaacaaagaagctggaaaatgcttacacttgtgcatttgaatagaacagaaagtgttacatgttataaatcacccaaataaacatctattatgacaatgtaaaagtgtagattacacaagtaattaaaaatcacaatcaacgtatttgttaataagtgatttcatgtgggactcaagttggtgagaggccctgactgcctctcttttggccctggtgtctctccttgctccaaataccatacagtttttgtatttctaaatgacatggccagaggacagcagtcttattacaaaacaaaaatacatgtactccaaaatgccatctttttgaagtttttaaaccatggacccatatgagcacatttaaaaacccaacgtgtaatataaatatatttttaattgggatatcagatggcaccttctctgtattttttctgtccgactgcatctttattggaagtctcgatcatgtaacatcaatggataaaacctctctcctttttctccccactgcattaactcaattactgtttctcttctcctaacacctgtttgttggagaggtgctgactagatgcaccagtcaggttgttctgaacatctgggagcccgagagagcctatgggtcactaggatgtttctgatgcaccctaagcttcagccaggtcctcaggggaccaaggggaggctgctgcaggatctcgggagtccctaaggccatcagatcctggaggctgcctcactctggctccaggcagggcagacgttgatggctgcttgacccagaggtggctgaacttctctcctcatggagacattaccctgggcagactagggtccaataactggatatggacaatttttattctacagcacagtgtctgtgattcaaattcagagcccattattgcaggctcagaaaggagattgcatcagtcagggttctccagagaaacagcaccgataggaaatgtatatatggccaggcacagtggctcatacctgtaatcccagcactttgggaggccgaggcgggaggattgtttgagcccaggagttcaagaccagcctgggccacatagtgagaccccatctctataaaaggaaagaaaggaaagaaaagaaaaggaaagaaagaaaagaaaagaaaaagaaaagaaaaggagatatgcaccccccccacacacacacacgcacacaggagatttataagaaattggctcaagtgattatggaggctgagaagtcctaagatccaagatctgtaattggtgagctggagactcaggagagctgatggtgtaaattccagttcaagtctgagccagaatgcagatcaatgtcccagctgaaagacagccaggcaaagcgagtgcactcccccttgctcagccttttgttctattcatgccttcaacggattggacaaggtgcacccacattggagagggccaccttctttactcagcccacccattcaaacgttcatctcatccagaaacacccccatggacacacccagaagaatccttaaccaaatatctgggcaccctgtggcccagtcaaattgacacacaaaaattaaccatcacagaaatacatcagcaaacatctagttgtaacatgcaatggggagggcgcatgtccccagagtctcctgagaggttggcaaatcatttcaggattggtctccatgcacccatgccattcttttcctccatgtcccctccctgtgcactaccttgggaagccaggtgcctgggggtactctggaaggtctgatgtatctgttttgtgtgtacaggaagcaggcagatgctgacaggtccctgaaagcctgggggaggcgtgaccccctggtgggtgagcacctcatgcgtggctgcgggactcctggctgggttccctaccgaggctctcccatgtgtgggtttttcgggatggggttgttgtctcaaggaatgaccattgtagagaaatgtaataagcaacttcactcgtgaaaacttggaggcatgaaagttcagggactaattaaaaataaatctcattagtttcttctccctctcgagttctgtgagtggtttattaatctggttttgatgtgccgcatgttccagccccgagtcgggaacctctttgtgggaatggatccgcacagggaagtcagtggtggtttcccagggatttcagctgtggtcacgaggggttcagcattgggctgaagggtacgcccggcaccccccaactcctggctgctgtcttcacggcacagctcctggatgctggctgggctctcacctgtattcttgtccctttcctataggaccaaggaggattgtggaagggagggcgttctcccttgcagcccccaaagggctgcacacccagtcgggtgtagggagggagacctggacattatcttgccttgtgactacaaagcctgacagcaactggctgaacacagaactcagcccgcagggatggagtaacggcacaataacagtgatggtagttcccacgttctatccacgcccatatgcaggctctgtgctagacactttgcattaactcgctccttcatccctacagcacctcagtcaccaaggctccatcccctgccccgcttcaggggagggcgctgagcctcagagacagagaggtgaagttatcccatcccggagttgtccaggcttggattaaaggttataatcagatctgcctaattcagaatctcattctcttcaccgctgcattgtattgctactttttacttttctgagtgaatttctggcttgttttagggaattaatgcaacatttctttgacagtgtgtgtccacaccatacccaacaggaaggaaagaagtgacttgtactcacaagtggtgttggcgcagcctccagggaatttaaaagggaagtactgtgcaccccagctcctccttgacccctccctcagactggccccaggccaggcttccttggccccacgtgcttgggtttccccactagcacagcgaggttaggggtgaggcatggccactgtggcatgtggaggcgctctgacctcctgggatggaaacggggtgggggtgagtgggagtggaatcacttccagcatcacagagctgataaactcatgctatggtggaaaccacctttcatcttcaaagtgcttcccgagcagtggctggtacataaacatgggtggaaatgaaacttccagccggccccatccaggtgccttatggctggtgtctacgtctcttacatttgatgcttctatgtaaggtatctaggctgttttcacacactgagtaaatataaaagcactttgcatacattttcaaaaaggaatcagttaaaatgggtgttcttctcatttccttttccaaaaagagagcatgcatttttgccgttagtgggggaccaaccacctgagtaatgatgaaaaaaaaaaaaaaatctccaaaaggagataagtctttttttctttttgttttgaattaaaattccatcatttttctatatctgagaggaactaaaagcccggtttattcctcctctgttccctatccttgcttttcctgccttaatgacatcctaaacttttgttgaaaataattgattgaatttaaatttccttaaaagttgaagaggtaatgttacagtataaatttcctaccaaacactaagtagggaaatatccattagtgaaattaactacagtttctaggtagctaacaatgtgctgtatacagtagggcatggctaatgaacactgcagtgggtgatatttcattatacaaattaatgctcacattttaatgggaaagtcacataatgaatctgggcttcagtgacagcaattagagacacagattgtccccttctggacaaggcactgtttagcaataagcagctgtgtgaaaagtcttcaggtttacaacatatatatgctttgggggaattagtgtacaatttatattaatgtactgaagctttgctgcaaagacaccaccatatttatctctcctggtgttaactaagtgaagagatggagaaggactaaataaatatcaaattgaggatgcaaatacaggaaaatattcagttgctcaacttaaaagtgaaacacttttggagatttagcaaaaaaaacaaaaacaaaataaaaaaacgagaagcatgaatcacatcttaaaccttaaaatggtttccaaagagaatatgaatccacctgttatttttggagaggtgctggtgggaacttgctctaaatagctctagaataactccctggaacagtgagggttcctttgacatatcaacagcaaagtagaggctcagaattataaaagatatgagcatgtaaaaataggtaccgtgaactaattaaaccacctggtcgtatatttctagaaattgatgatacagtgacttgggagaggttatcaatgatattctaaagctaaatctatatcttatgccatgtgtcagtgggaagctggcttactgtacgacagtgccaataatttcattaatcaattggaatgatgaactgcggccttttaatttcattatgccttttctagcaaaactcttctttctagaaattcattgtttgggcccacatcttactccttaaaatatagtgagaggtttccccgcagaaggctaccagtgttcgtagctgcttcctttagtgggcaaagagccccattctgcacatttcacaatgactgcctgctccagaccccatctgtaaaatagagcactgtgacccttcagtgtttgaaaagttttgagataggtactaatatttaaaaattaagatactgcacacagaaacctcatagatatgacacttttcttttttctagagacagggtctcactctatcccccaggttggtgtgcagtggtgcaatcatagctcattgcagcctccaactcctggactcaagcgatcctcctgcctcagcctcccaagtagcttagaccacaggtgtgtgacaccacacctgcttaatttttaaattttttgtagaaacgaggtctccctgtgttgcccatgctggtcttaaactcctgggcccaagtgatcttcctgcctggcctcccaaagtgctagggttacaggcctgagccaccatgcctggccgagacttttcttggaaaatcaaaggttctagtgcccacagttggttagagttgagtgacactgtgctccaggagagaacggctgttttgcatactcatctgatctgtgtggttctgcctgcatgcaagtgtgtggcacatataacagataaacacaaagcaatgaaccacaaacatcatggaggtcaccataggactcttgaccccctggaaaccttgggaggcagcctgagtggtcccctcagtagatgggactcatttatggcctaagtggccaatcactcaactagacagagctgctggcagggtctggggctgcctgtaccatggggctgcccaggcaatgcagacctgagtctcaggcagagtccagccttggttgggcagggctaggcaggcccaatgcctggctcttttggcatggatctggccatgtccggaggcctgggatttgctagagttagcccagagcgcttgggtagaagagcacatccagatgcagaggccttggctgggaagcggttctcagctcaggtagactcagcatctgcctgtgccggccaaatgaaagagcagatgtagaccgcaccccggagcctgtgaaatgtgctgttaggcctctccttgtggttgctgccccaccccgtctaggccaacgttgtaagtagtttgcctcctgagcactctgaaatgggccctctgaggaaagaatgcctgggaaacagctgggatgtttccagtggagcacaagaccctggggctgctggggctctaaggaggttcacagctcaacctctgggtgtgcctggctagaaacatgccctggccggggctcactttcatctccaaagccttcccctgtgccccttgttggataggaagcccggaaagggaagcgagggctttgagatagagggcaggggtggttcttccaatcatttagcgattacgaggaaattaaaattgagcttgtttctttgtgaacataagtccaaaggggaagggtttatcccctggaacagcgtgcccacctggagcacttaactgaggaactgggatgatcggaagaaaccacccaaaccaagccctttagcgacccggcaggaggtggaactgtatagagaaatggacagaaagagcaatgcagccctttcatcccagtgcagaaggcagaggaagcatgggtggagaactttctagaaccttgcatagcacgtgcattcagaaaacccttgaaagctcatgaagcagcccctaattcaccaggcctgggcccgtggagactccaatgctaggaattagcctttcttgtttctcagctctggcttttattctctggagcagtgagggccaaggcctattttgaactctaaagacagtgggtggagtgaagggatgctatcttcctgtgcactcgcatgctgtgtgtgagtgtgagagtgcgtgtgcgtgaactctgctagcctgctatatgatatgtctcctccaaaagccatgagagcagagaacctacctctttggtctttactcagtttccagggtcaagaagggaggtttcaggtgtttattcattcatccattggttcactccatcaaaaaaatgtgtgtgaatcaaactgaaggtttctgagtcagtgggtgacaagtatgtgcacaagtagcactggctctattcaggagacttagtttactcctaaacgagcttaggattggcgtgagaccccacagaacatgtgcttcaacatgtcttattacaggttgaggaagaaaaagtcccaagaccaggattctgtgtccagtggaattcagagtagcgtgggtgtccagtccctagtccagattctcaaatacctcctgaggtctagactgtcttccctgctaaaccattcatggttcccacttcaaaggcacttccaaggaaggctgcctacaatggttccccactcaggatccacagagggccacctgggaaagtcccgaaagatcccgaaaccaagtttgcatctttggccaattaactcagaatgtggggaggtgggaccaggtatcagcacttcatcaagcccccaaggcaattccaggatggtttttcaagggattgtctttacatgtctgcaccagaatcatagggacgcttacaaggccaacttctgcgccgaccccagacccagggaatcagaactgctgtgccttagggccagaactggtgtcttaccacactcccctggtggttctaatgcacaatacagtttaagtactacccgctcccatatgtcttttttttttttttttttttttttttttttgagatggagtcttgctctgtcgcccaggctggagtgcagtggcgccatctcggctcactgcaagctccgcctcccgggtttacgccattctcctgcctcagcctcccaagtagctgggactacaggcacccaccaccacgcccggctaattgtttgtatttttagtagagacggggtttcatcatgttagccaggatggtctcgatctcctgaccttgtgatcctcttgcctcggcctcccaaagtactgggattacaggtgtgagccactgcgcttggcctcctgtgtgcctttcaaacatgtatccattggaaatagacacacacatcctctgtgcatccccacagtccccacccagaaaggcagccctccacattcccaggcttgagaggaaagtccaccttccccctctttagctccgctaatgaatgcccgtgctttctctatggcccctttgcctgccagatgcacataatcatttccaggtgcatttctaaaacacagcctgagtcccaccaggcacctgcgggcctcacctctgcaggctttcatcgcctggccctcccgcagggcttgctctcactcgtagggcaggatcttgagtttctaggtaggcttgcctgctgtgggccccatcacaacccctctaagtttcggggactgcctctgttacacctgatcactgggcttccagataagctgaatcagccatgacatcctgctgcccagaagtgccccatcccagcctggcctgcgatgggatgtctacatagcagtagctcaatgagtctgagtctaacctgggactgactccaagaagggggaaattactgcctgaaattctctgtgcctttaccccaaaggggatagagacttcctcctagattcctgtcattggtctagctagagatgactgtgacctttacgtttagagaaacagattccctgctgggttcccttcctagacctaagggccacctctgaaaaagtgtccaggagagatctcagctgctcatagcaactggcacccttgttctgataaggcaggcagggtaaccacggttctggcacgtgatctggagatgacatggcatctcctgctcagaaccaggctggtggccctcttgctcacaaagtccacgcccccaaatgccctgtgcctggagaactgggactcatgccttccgctgagactagacacagtgaaatgtcttcagaagacaccattcactgacgatttgttgttactttttagatcagtctattttacaatagaacagaggaaggggagggggaatagttgaggttcctggaagaaataattgtggatattgacagggcaccattgtgaataagagagcggggactgtcacagtccccattccttccagagagccttttgattgcaaagtctggaaaagacctgggattgctaacaaattcttggaatatatttaaatctgcagtcgtttaccttcttccccttctctatcccacaatgccagcaaatgtaagttgtctcttctggtatctttttccaccgtggaaagaacaatagaagttgggggtgttgaatttaaataaatatttaattcatgaaaattatcttatatgttttaaaacactctttaaagctatttttattctctagaaagcgcttattataggtaaattacacattttactaccggagcattaggtttgccattagtacaaatttaaggcactacaaagaccagtagataatgttaatttcaaatacagaaactaaatatattttgtgcctttttattactcattttcttttaagttttattgactgctttttatcttaactatatgtctttacatgctgcaatcataatgcactgtaatggtattaatattttatagaatatgtatttatagttctttatttagaaacagtgcagtaggtctgcagatatctgagcccgtctggaatggtgccctccaaataatgataaattacttgtgcagtatgccatttgctaattatatccatgatttactgcagagcaagacttaaatcattcatttcagtcttgcgtaacagtgccataaaatttttaggtttaaaaatggtttccatgtgtataatttaaacaaattttagatctattgtatacacaaaatattgcaaccacccatttgttacatactttctctttttaaacttctacttttaatgatcactgtggctgaaattattatgcttaattttcataatcatagcttttaaatctacagccgttttcacatgttagataaagaaaaagatagctaattgtgtgtagatagtatgtcattcctgaatagtcccaaatggtacaaaatcattaaaaaagcttaagagtacgaattattcttctattaaaaaacagttgttctctaattattagtttgagctgctttgtttcaaagaacaaatgttgatccttccagcctcgttcagcacaccaaaatgagataaacgcctcttttttttcttatatcaaaatcttgcaggtgagaaaccctacaagtgtccgcactgtgactatgccggcacgcagtcagcatccttaaaataccacttagagcgacaccatcgggagcggcagaacggggctgggccgctgtctgggcaacccccaaatcaagaccacaaggatgagatgtcaagcaaagcttctctgttcatcaggccagacatcctgaggggggccttcaagggtctccctggaatcgacttcagaggaggccctgcatctcagcagtggacatcaggggttctctcctctggagatcactcggggcaggccacgggcatgtcttcggaggtcccctcagatgctctgaaaggcactgaccttccttccaaaagcacccacttctctgagatcggaagagcttatcaaagcattgtgagcaacggtgtgaatttccaagggtccttgcaagctttcatggacagttttgtcctcagttccttgaagaaggagaaggacatgaaggacaaagccctggctgaccccccttccatgaaagtccacggagtggatggtggtgaggagaaacccagtggcaagtcctcccagaggaagtccgagaaatctcagtatgaacccctggacttgtctgtgcggccagatgccgcctccctcccgggctcctcggtaactgtgcaggacagcattgcatggcacggctgcttgttttgtgctttcacaacgtcctccatggagctcatggcccttcatctccaggccaaccacctgggcaaagcgaaacgcaaagataacaccatcggggtcacagtcaactgcaaagaccaagcccgggaggcgagtaagatggccctgctgccctcgttacaatcaaacaaagacctgggcctctccaatatgatcagctctctagactctgcttctgagaagatggcccaaggtcagctcaaggagactctgggagagcagaagagcggtgcatggaccggccacgtggaccctgcattttgtaacttcccatcagacttctacaagcagtttggtgtttacccaggcatggttggctcaggggcctccagttcctgccccaacaaggagcctgatggaaaggcccactctgaagaggatgtccccatcctgatccccgaaaccacgagtaagaacactactgatgacctctctgacattgcctcctcagaggacatggactcctccaagggggagaacaacgatgaagaggatgttgaaaccgaaccggaaatgatgaccaagccactgtctgccctcagcaaagacagcagcagcgatggcggggacagcctgcagcccacaggcacctcccagcccgtccagggactggtctcacctttatcccaagcaccggagaagcagtggcacagccagggtcttctccaagcccaggaccccttggcgggcctgccaaagccggagcgggggccccagagcctggacaagccgatgaacatgctgtcggtcctcagggcctacagttctgatggcttagcagcctttaacggacttgcaagtagcacagcaaattctggatgtatcaagaggccagacttgtgtggtaagttttagaatcctcttcctatagttcatttcccaaaacatcagtgctgaattgtgcatttaaaaaaatgaggtagacttatccatgagcaacttttgaatgaaatatttgaaaaaaccctcaatgctgtatctgcaatgtagacaatcataaaagtccattttgtttagaagttttagaactcatacttttgtgttctaatttgcattataatgtactaaaatgcctgtacagaaggcatggaaaagggggtggtcgctcaccatgtgaactactcctgtttgccatctagaacttgaaggggggaaaatcgacttacaaaacaaaaatgaaaagagacatggtaacttgcaaattcttcagtattttcaatttatgcaaaagatgcctaaagacaattccttactgctttgctaagccaaatctgctttcttaaacttttcttttattgacttagaggatactaaaatcatatcacactaacaacagtatggaaataaagcgaccttctctccaaagagggagatggtttctgggtgtttgtgactcatttttagacaaaccaaatggcagttactgtgactttggccttctgcgcttgccttctgtttgtctgtctgttcacctgtctgtctgttgctctaacaagacatgtacattgtgaagtccctgaacagtagtggtgtgaccctgtgcatcttggattcatgcttgtctgatcctgtagcaaactgacacttctttatctccttaaagcatatgggtaccccaaaggaattccagatttccgaacatcattgtaagtttaaggactaggtttggatcaaatgaatgtttgggtgggcagggggaatcaaagtcattgtcttggcaccctgatatctgtatttggaagcctttctccgaaaagaagctccatgcattcttccctttgaaaccagctccaaatatcctcaccagagacaaatgaccatgatacatttccaactgtaatttatgaatggatttctgtaattttacttcacctgtggaaggaaggcaggaaggcaggaaggcaggaagggaggagggcaggatggaaagaaggaaggaaggaagggaagggaaggaaagaaaagggaaggaagggggggaaatagaagagagtatttttgaacctcaacatcctgttgttcgtttaagcacagagaagaattcaggaagctagactctgggttcataatttagattgatatatttcttttattcctcttcttccctaattcactaggaactgaatcaagcggtcagaaatatttttttgaattgtcgaaaatcactaaatggatttctgacagctcaaaaaaatattgacagttccttatgctgaatgattcacaaggccccattaaccactacccccagatctatttttagccacatacaattcattacttttgaagctgttaaaaacaatatttaaaagaagggaaaaaagcgttttatgttagtccaaattttttccccttttttttttaaactgggggagcaatgttgaaggcttttttttctttttttcattgttgttttaggtttgtgatcggggtggtttcttttttattgttgtttagagtcttttttttttttaagtctattttcagttctttcaactacctacgtaggaccatagtccctgccaggaatccatgcatcagaaaagatcaaaacctggcatgttcatgagctcattattattgaaatgagctcatattacccctattaattttcccatcttcctatcagtaatgaaggaaggctgcctggctcgaggaagtttgcccagtggtatcctttcgcaccaggcgaggttgaatgggaagccaacgtcagggagcctgccgggtcttgagagccttttatctctgggctgcaagctcctaggaacttctcaccttttcccaaaacagcagcacacgacacgtccctgacatttccccgctatgtgcaaaccgtgttgcccagtccacccttcagcctttgggcagcagatcctgggatgtaagttgtgccccccacccctcgcctctttcatggggcttggggaccctcatgtcagccaagcttgaaggcttcctggttgcttctgcagcagagggttcaggccccttgttccgccttccactcctgggaagatgctgaaattgactctggccacgagctgcctatttttagagagtgtgagttctgcattccatttggccccatttcttctgtgtcctcttgctttagtttggaagtaggcaggaaaagaccctccctggctcttgcatttgcttgggggtggggccactgccctcttgcctctaggatgggcctgactctgccagttctcatcccactccccccatatctggcccaccataattgcagtcctcttcttattttcttgcgggctactgtgatatcccagaaggtccagacatattcatcctttctaaaagttacaacctaggaggaacacaaatccaaatgggctgttttttttttcttaaatagtgtaattcactctctttttagcatggcaagaagcacaagtgacatttgtaagcttcaaacccccactagcttccctttgcaagggtagaagtgatattagcacaatgaataaaatatttctaatgtttattcctccttctcttcttcactcaaagtaggtatgggtttctaaatccgcctaccaggctgatcactatttctccttaagaatctgggctttgtcagaccaaagcatcattcctagatttctcatctcagatggataaagttgagggctggttttgtctggttagtagacctaaatccccactttcatgattatagaaacaggcttataggaggagctaatgttcccatgtttcttaaggaagggctctgttctcaaggggtgtaaaagtgtttgaacaagcatcagaaatacctagttcaaatcatataaactccccacagatctcagcagctcctccaacccttgctgttgatttggagaaggtggcatctcaccctattctgtgggtgatactcatattgcaggctgtactttcaggatcttccatcatttctgcatgccttcttcctaacttttaaaactctggtcctaaattccttggtgccatagagccagggtcctggccagtgtgccctgcccatcctaacagccaatggattcctaactctggtgcagaaggagagccaccgaggggagaagccgacccagccagttgggtggggagacgcctgttgcatatgacagtgtcgagagcttcagtgggaattttctaaagctctttccacagaggacagcacacggcctgtcagagacatattacaataatcccaaggaagaggttaagccatcttggattaagccagaggacaggcatctttgcttccacagtgggtcagatcccactaggggtctgatctcattataggaaatcccactccaatcaaatccttagtttcttgaggtgacttccagtctccaggcatgggtcacatgtctttattctgtcaaagagcataatgtacaagggtactccagtgccatcggagaatttggatatgcccttggttttattggaatgtttgaccttggttttgtaatgggatagactccacatgagtatttaaaggtggagaggggaagaccagagcagtgtttgcatccatggacaaagcaaggcagataagcccagtctagtctgagaaatgctaatgcactgttgggtcggcacttggctgggaaggggcaggcttccctgtgcacacagcaccaaggctggtctgcacagcacccatggggcccactgcatggaacggttaaaaagtgtgtttcatctgggagtttgtggatttggacagcaaccagatcacccttactccttgcctttcaaacctaagagagatggccagggtgtggagttgttgtgtgccaggtctcccagtcaggctttgcactgtgtcctttggtggacccaggggtaggcaggacagagaagaatgaatgacagatgaacgggaaagcagggaaaagagcacactcccctttgccccaaggagctctgctctgtagtgactgccactcagggaaggctggctgaactggtagcatctgtaagcaggctgagggcaggcactgcggctcacacctgtaatcccagcactctgggaggctgaggcaggggcgttgcataagcccaggagttcaaggccactgtgagctaggatcatgacattgcactcgagcctgggtgacagagtgaaaccccttctgtaaaataaacatgaaataaatatcagcaagttgattgtgggcacgaggccctatgtgcagtggctaccagacctagtgacccagtgggcctgggaggaagtgagggagaatgcaagcccattaacagcagtcatcctaacatccccagcttatcatcctcaggttattgggcaactggcttccccaacccaaattatacctgagactatggaataaaggtcttctgggcttccacattagtgaaataattgggacccccccccctcccaagaattcgggtccattgaaacctattcaaattacatatttttatgtgtgatgagatgaaccaggacaaccaaagctgaactctcttaaaatgtgacttatcttttccctaagccttatagatttcttggcataggcagtcggagaatacctacttttttttttttttttttttttttggagatggagttttgctctgttgcctgggctggagtgcagtgtgcgatctcggctcacggcaacttccgtctcctgggttcaagcgattctcctgcctgtctcccaagtagctgggattacaggtgcacgccaccacacctggctaattttgtatttttagtagagacagggtttcatcatgttggtcaggctggtcttgaacttctgacctcaggtgatccgcccacctcagcctcccaaagtgctgggattataggcatgagccaccgcgcctggccaatacctacccttttacgagctactcagtctaaagcaacaggcagcaaatattttcttaaagggccagagaataaaagtgttggctcacaggccatggggtgtctgtggcgaccacccaactccgctttggaagtagcaccacagctaccatagacaataggaaaatgatggctgtggttgcgttctattacaactttaggtactgacaggcgatgcactggaattggcccacagggtcttatttggtcaacccctgctctggtgtaaagagggatgtgttcccgtggtcatccctagggaatgagtggtgcaaacactggtcctctgttattctgctggacagtgagatggtgatgggagacccctcatcatcagtggcagggccccatccattgtctggtaatgccaaagccagagatgtgagagagactttacagtggtagaggacttgttgacccagatgggccgatgccttgtttctgggaagccacacctctgtctatgcattaaagacttccaggagaacaccccagcacagtgcaacccagagctgccccctcatagccagcacacacagaagaggaagcgggcagtggctgtgtgttgtctctgatgcaagcttgctctgtgaaagcctgtttcctcactgatggaaggaagcgtagggatgaaatagatgatagagataaaagagcttggatcagtgcttctcagttgagtttgcatgacgtcgtggagctcagcatccacgtgaaactgttgcaaggaaatgatgtcagtgtgcaaacatcttcgggtcacaatcgtcccttaagcacggcaggcatcaaccttacctccatcagtgttagagaggcacgtttcatttcctcacttctgccgtgatgcatggttgatagctctttcttggtatgtggagaagtttgctttgaagatgattctggcaattttgtgatgacctcccatcccaatggttacactatttctgtgtccactccattctcttcctgataccaggcaagtgcttgggggtaggaaatgagtcctgccctgcctcagtctttgaccaagaaacggcaaaggtctgcagtcaattagagacttggaaggaagccatggctggggtatgaaatacacagtgagggccgcatatgtgcagacaccctgagtataggctgtgatacacaggctatggccattggtacatttttcatcttgtgcaagagtctacagtgtggcccagaagccagcaggttctaatgaagaagggaggtgaaggtaggaaaatggcataggaagacaaccacaaaatcccaatctgccgagtgtgtgggagtgcaggctgtacccagccagcacaagaaggcaattggcttgagggtgtgggagacctggggcatctccactgcaagatctttttgtctctgttgctgccttactttattcaaagacaaatgtgctctcatacctcttccttctcttttttgtgagctgattctcacatggattggcctcagagactatggataaagcacacctttgcattcacctcctttgcccaattggataatttacagattagctattgacctctatggtctggcctgctctcatttgtactgtgtgtccggggcctgacattagaccccaggagggaggaccatttggcctgccttgaagtccaagggcagaaccttgtgagttaatgcaaatcaccgccctgttctgcccctgctggctgcctcacaacctgctgcagagcttttctgtttgactctggagggacaaacacaggcgatgtcccctaggatctcttgcagaaatcagcacctggagtgggctctccccagccctcatcctgagccctgctgtgtgcactgtgtctgatggagaggcagcctctctggatggcagctctctccatattccaaaggcattcttctcctgttctccttccctctttttaaattaaatgggaatgccactgacgtgatgtcgtttgcactgcaggatgacagaactgttgtgtgaataccattgtatttgccaaatggtccactcgtcatttcagaacaaacaaatggatggtgtctgtaagtcggcaaacactggtgacatttagccttgtttatgttcctttccttttgctgcatatttttggctccaaaagctactggctgaatcaacagggcctctgaatcaggagagaagtctggtagcattaattttagttgctatgtccatattctcttcagactgcatgaatcctactgctcaggaccaagtctaggtgagaggagagggcaatcaacctctttggtttcggatgttgtgtgcaaagcccagggttcaaataagcagtaattatctcctattacttagtgctgatcaacagcacctctacgtctaattgccaacctgccctaatcatgttgactattcttgctttagccagagacagaaggaccaaattttataaataacactttattgtcattattccattaaacgattaggggatgtggccctgcccttgctttcaaatgcctctagccctgatggtttctggattatttaataaatctgcacattttcttgcaggtaagtgacactccctgtcctagtcggtctatctggacttgcccttgtctgttcgtggtcctcggtggttatctgcagcttgttaatcgtgtaaagtcaagagaagaatgtatacacatatgtgtgttgaataattactattggcataggtatgtgtatacacacggtgcaccaatctacagtatatatagcagagaatcagaggctaaaaatattaccccatatgttccagtattagtcatggattgcaaaggcttagtaacttgagcaggagagaaaactccctcaaagtcataaatcctgagtgacaactgctgctggatgacagatcccttcacctgtggacaacctggctgggggtggggggctgttccaccagctcacctgagcatgtagaggtgggtcctgcagtggtctcgtgggtattactgcttgtgtctgattgtcctgtattttgtaacactttagaagaatacagaaaagtgcagtaattctctttctccatagtatttaagcagaaatattgctagtttaatattgtgtcaggtcgtcctattaaccaggagcagatgacagtaaaatttcagtgaatagcaccttgacatctacaacttaaaaatggtgattgaagcaaaatatgtaaacttgtacggggtgatcgtgtgctttggaacagagtattgttgaagtaattagaagatatattaaggtgttcctggtaatgaaggcatgtaagttataataattgtagctttctgaataagtgtcaaactatatctttaagtgtgctgtatgctgagttacaagttaggtcatttatgaatggaatgtaaaataatactaaaaatgcttcaataacttatcttggtattgctaataaaaaaaaaaagctgtgaaacattagtgcagtttggagtcattatgttaattcattccgcaacatccccctcaccccgacattcttctcactgttggaagcctcaacaggacattcagggaatgccattgaccctgcttcttgggctgtttgccggggcagatcattgcatttttctatccactcttaggtgggccctgtgagtaacaattcataaacatgcaagtggaaaaggaccttccaatttgggtggatgactgtggggggtgggggagagccaggcgacacgggcccgtttctctgtacaagtgacttttaggtgtctagaccccacaaccgcccagaggaactgtggctggggtggtgggggtggagggtacttgggcacggagtatgccggccatcatgccccatcccagatgtggaaacgctgacacccagcctcccttcagcaaatctgaacatgttcttttcatcctgcgaaggggtagtttgtaatgaagagactcaggattcgcggaggtgggaatctttatgttctgctgaccttttcggactgtacttgtgtttgctgtaacaggcttttgcctgttgttccactttgcctcctggtggggagagaggtgtgggaagaaccgattttgctttttgcttgtgttgcttggttttgtggtccgtgagctggacttgagggtcctgccatttcaacggtgtttccaagcttctttgcttggatgtgttttgtaaatttctaaattcaatgaccatccctgagcccttgtctaactggtccttttgggggactgggggtaggacacaatctcataggacacaatctcaagctccaagtccgttcttcacaaccccaaataaataaagtgtcctctgtgtaacaagggaatggaaacccagaaatgctcattgaacaaccctggcctccgcaacaggacaattgcatcaccctagctggttgaaacatttcttccggtatttctcataaaaccttttcaagtgactctgactccaaagaccacagtatggcattaggttgtcttttattttgggaaagaggtaaaaagtgagagattcggagtctgagaagacacgataaaagcttcaaagagaaaatgtcgattgtgaagaaggttgtcagatttcctggtggtcagtgcccacgactgttgcctgattcccttcatatgaagctgggagcacataccatgggttcctttggaaactgtgatggatccctaaatgcctagcaaaggtaaagtgaatgaccctaacctccaggccccaggtctgtgtggccacatttaggcagggccagtttccactgccagtgtatataggccaagcctgtacaagaagtagggccccaggagaggtttttctttatttgcaatgtcccctgagtctaaggacctgccccaaggggaatggggtgcacatcgagggaaaaattcctccaagcctttttctcggggcctctgtccagggctgagcacactgttcctggcgttgccggtcatgtacaccccgctgcccacttcctgcaaacctggggcaccatagcacctgtgggttttgccagtcctcctgggatggggcccagaggggtatagatggcatgtggggggctgggctttggaggcagagggagtgcaaagccagtgagggagaggctgctgaagggaacggatcttcccagccctttgcattgacagcctggaaggctccctggagccgtgtattcaggcgtctgctgttctctcttcctttccatgggggcccaatccccctaacgggatctccaagctggaagactcggaagcatttccgtttctaaagcagggggtatttcctgagttgctccccggtggaaacttctcaagcttagagggggcctttgtggattctcattctcctgcttttatgaagccagctccgtcctgctccccatcttctcatttcagggcactcacgccgtacactccccctgcttcccatccacctcctcctcatcatccccatccctggttaacaacttccttctcaacagttgcgtgttcttgggaatatcccgtcttctgcctgccggggagctgggtggattcagttctgtggaatgagccaacttcattttacagctctgcaagggggtcaggaattctgtttcctgtgtgttccttccccctaagccaccttccatccccaagtgggattataacaagcccaccatccccatataccaccatccatccccacatgggaatataacaagcccacctcccccataaaccatcatccatccctacgtggatatataacaagcccacctcccctgtaaaccaccatccatccccatgtggaaatataacaagcccaccttcccccaagccaccacccatccacatgtgggattataacaaaccccacctgtttgaattcagacctgaagcaaatgtaaacatcatccattggatctaccctcagcctgagacctggacccttcctaacacgaacaccctggtctggataagagaccacccccccgccccattgtatatggagcagagttccaaggagacatctgtgacttaagatgagagaggccaaggaagggcagagtgccttgcagtaagagagtcttcagatccacttttctatttacacatgttcggaagtgtgtttgctttgatgagattgtagatattctggttggagaaaaagaatctaaatgttgggagatgattattccataagtatagtcactttttctcaaagaaacttcgcgatgattaaattacatccccaaatcggcagcagtgcattggcaatattgtctctgcgtaagcagattctgcctctggagcaagggatgcgcattttcaaggttaaagttggggaactctgcacagctatttcattagcaaaaatagccatttgtgcatccagacattggctggcttcacgaggggtttgtctttcatgttctttgtggagttgtccagacacacccatctaatggtaactcactgctcacaaggttaagttttctttttgaacttctgttgttgtcaaattaacataatatgctctcaattatccacataaaaggagaaaggcaaccaagcggggaaagcaaatttgcaattaatttaccaaattattgctctttttatatgatggacaagttgcttttttcttgagttgggatttgtctctactgggaagagagctggggttgaccacgaggacaggccactccaaggtgtgccctgcacctggggaagggctgaaggtggttttgctgaggtgcacagtggccccagtggataattagggactcacactaggattagctctttcttgtcaagtagaggggtcgttagtcctctcaatcccctaagacttccttggtgacctagttgggtctccctagagcagatcctgaggtaaggacctggatgcaggcagtagatatgggaggtgacccaggaagcatgagtgagggagcagggaagggagacagagaaggcaggtaaatcaacaagcacaggtgcactcatgagagggtcagtactgcaggaccatgggggctcagcccctttgggggtcctctaaggtactacgtggagctcctcttggaacagtctcttcaaggattgaaggagccggggtatttacacaccagcttttcctctcccagcagctgagggtccctccagcccacctgatggccaaccattcttcccatagtgagagaaagccctcaggcagaatgaagcaagaggccattggtattgccagataatcagataatcagaagggaaggaatgaggaaccaacagtatctgcttcaagtgagaacaccctcttgggtacccagtagaaagtcgcagacctaccagagccacagatgagaacagatgtgcaggtcatggctcctgtggagagggaagtgcatggcctctcagcttaggggccaggttactggaggaaagactggcgggctggtctgggggagaccttgaagcaatcatgttccaaggagcttagataactcacgtgtcctctttgggcaccattttcctctcagccaaaggagggagcattccagatgtctgctccggaccctcttaggtcttaaactctatagtctccaccacccttttccagtcctcacttttcagatgactcctccggaccctgtcagtcctggagtccccataccagtagggcccctgggatatgttctggtttcccacaagcataagagcatgcaggctttctatttgggcaaggccatctgccattccagtgcacgggcatatgaaacttgccttatcctgaagatatttctgttaaattagaagaagaccattgaggattttcttttaattgtggaagtctgttaaaatagcaaaagaaaagaaaagaaaggagatcaatgaaactggattttcagctcatggaaatgcaagaaaaacctgattatctgacttttttctcttttatttttcaacctgtcgagctcacagttgagcttgagaagactgtattttttatgatgatcaggttatctttgagtgctttacagataccagtgtgtgaatccaggagttcccttttggataaaagtgcctcctgctttctttcaatacatgtatccatcacacttagagggtgggaacccaggcaccgagagatacgggctcaggctctcatcttgcactcacggggcacggaagcagttcacattcacttccttctgtgcctgtgaccatcccacttttccatcctgagaattcccttggtcactcaaaatcactctgagcttgcaagcccggggtagtttggaacagtatgctctgtctctacatgggaaagctttttgctttcaattggatatcttgtcataggcatttcttaatccaattgcctcagtgttatcacccatcaaatgaggcactcgtgtatcccttaagagaataaagtgaatatgaagaacttggaggttgtcgagtcaccctcatttcaattattttaggctttctgcagccatgtaggctccaggcagagcttcgatgaagaccgagaacccgctaaaaccccgctgagtggctggagaatctgggcaggttattataaatcatggtgccccaccctcatccttgccaatttgtactcaccgctggaaggtctctttctggatggcccatctgggattcttcccatccctggggtgaacacatctggaggtctgttggggaacctatatgataattcaacaagcccattcttgcgatggacagacacacccccattggctccaactgagctgttttcactgttttctagtggtaaaaagtatttaccattaggaaatttttaaaaatcatctctcgtggccaatcggtggcccagattcttgtatcagtggtttttgggtttcattaagactttgggctctacaactgtcctttctaaatgatacccagtaatttaattttaaatcacaaagggaatgttcttgaagcctttgaggtaaatgccgctgcaaagtgaatgatcacctctaatttgcacaggttaaacacctggatgtcatgttggggtggttttgtgaagttcccagttttctttcgtgacagtgggttttgcaacaggagctgttgtgtgaggtgggtgatgggactggggtttgccaggcaggctgacctcacatcccagaagacacaggagggagaggtgctgggcgtgacggatgctctagtggtgggaagagggattcctaagggccccttgcccagcctgacaacccctgcggatgagcccaaggacaggctggggcacacaggcctggaacctccagatggacacacacaattcccactatgtcaaggtgtctctgggatgggacagcagggaggcctagccccaggggcctgggatggggggaccaagggagagggagagtgccacagaggacccaagggctaaggggaccagaaaacaagagggggtgaatggctgaaaggaagagaaatgcatgaagatagagggagagaagtgcaaatgcagttcaaagagaagaaggaggaggattaaagagaacctggagacctgggaagataaaattaaatgaaagagtcgggtgtgttggcacatgcctgtgctcccagctactcaggaggctgaggcaggaggatcacttgagcccaggaggtggaggccagactgggcaacagagcaagatctaaaaaaaagaaaaaaggaaaggagaaggtaagagagaaaacaagtaagaagagagtagaagagaaatggtggaggttgcatctggaggagaggaaagagtggaagaaatgggtaaagaggagagagagagagaaggccagcagaaatgaaaggatcctggcagggaaccttttccgaagcctcctggggctgtaggtgcccaggctgatgggatgggccatcccactgctggtggtcctggtggtcaggctggggagaagggtgctcagtggctgtgggtagggatgttggggaggcttcgagggtcagggagacccccaagcgcagcccctggcgctcgggctggagctccagcagtgcctcctcccgcttgctccactcccaccgccagtttcaggaggaaatgctgcagcttaatcagaattatttacaagataatggtccattgtttgcactgagacagatgttgtctgtgggaactttgtgttttatgctcttttccctgctctgccttcactgggtgcagatgggatggaagtaatgtgagttatgactccaaggattggaaacggggagatgctccactcctgcctgggctcggcggggccacagagctgggctggcacctggtaggcaggggtggagaacagccactgtggctgcagggctgtgattaagaaggtcttatttcctagaggggcgggtccgtgccatcgccttgtccgggaagaactctgattaagatgcacttctgtttgttgcgttgagaggtcaccgttgacatctcaaacgagggtgaccatctgctcctctttttgccaaaaggaaagctcaacccctctggggtggggaatgtgtagacccctttccttttttttttttttttaacttatcagagagcttcttcttggtcttctggagtcagttaggaagccaaatctgggcttgtgactgcctgccctgcttcttcaagggtaaggtcagctgagtgaatgacggctccatctacttacccggggagagagcatgttgcagaggaggaaagatggggtgatctggggagacttggcctgctaccggacttgttccgagccttgccccggtgggggcccaccctcctgtgaagcccgcaggtctgccaggccttcagcacttctggaccccagccacttctgcgtaaccagaaaccctctgtcattatcagaacccattttatgaatgaggaaactgaggccaagagatgctagatggcttgcccacagtcttttttctttttctttttaaatttttgtttttatatcattgcatgtggtgaagtttggacttttagtgtacccgtcacctgaatagtgaacgctgtacacaacaggtgatttttaaaccctcaccccctcccacatccccaccttctgtcatctccaatgcctgctgtctgctcttgctgtcattttctactcttccagcgcctcaggttatgaccttcccactccagggggcccctctgagcctcagcttggccagctgaacaccaggagtgaggatagctgttgcagagtcagggaggggaattccctgagacacacacctccaatgccaagcaccgaacctgatagcccatctcacagatgacagcaatcagtgtcatcaaccgcatcacaccagtcctccaagacacagcatttataacgtcaggctgtgaccaccaacaaacagaaaaaaacaaagtaataaaatatcccaggtcacgcttggatgctaaaatcaagcagtcgtggaataaagaaagtcactttcagggcaactatgtaaaatcagtcgtggcctttgggcagcctagaggagaactcagtcagccacggctcctaaccctgccccacaccctgagtgtctatgaggggtcacccagaaatcagttaccaccgggacgttttgttccgttcaaaaaccagccgtgtgggggcatcctgggtctggggcagatgactgtttccccaaaatatctccatgcccaaggaacagctccctttatcccagcagcaggatctggtcctccgaactcacccactaaccttccaagcaaagttgtaaataataaagacttcctctgtggcaagtcctgttctaagctctgtacagatgagagtacaaattagcttcttacatttcatcctcatgaaaacccaaggatgtggatggagtatttattattctcattttaagtatggggaaactgaggcaccgagcagcatcttgtcacacctaagatcactcgcatgtaaacaacggggctgagattcagagctggacagtggaggtccctgggagtggcctctccgggcagtggggggatccctgcctgtggcctctccggacagtggaagtccctgtatgtggcccctctggacagtggaggtccctgtgtgtggcctttccggacagtggaggttcctgggagtggcctctccgggcagtggagggatccctgcctgtggcctctccggacagtggaggtccccacatgtggcctctccgggtagtgggggtccctgcatgtggcctctttgggtagtggaagtccccgggagtggcttgtccaggtagtgagggtccccgcatgtggcctctctgggcagtggagggatccctgcctgtggcctttccatgcagtggaggtccctgtgtgtggcctctctgggtagtggcggtccccgcgtgtggcctctccgggtagtggcggttcctgggagtggcttctctgggcagtggaggtccctgggagtggccactcagctgcctcaccttgcgggtgcttttctgtgcctttaatacacatttgagatgcgtcaaaaataaagaaaccaaccaaaagtacataacaacagccagttcctgccagcccgccaggctcatgtcaggagagaatggggcatttctgagccacgattctgcgatttggcgatcctaacctgagacagggcctggggagcaccgtcttggagcgcgtgggcggggcactgggtagggaccaggtgtttgggttgtgaccagagtggctttgaacctgccacgtgaccctgaggagctctcctcctatcccctcagtgtcctcacctctccataaatgacaaagtcgcagtgataaccctgagtccttccatgtcacagtctgtgaatcagttctttttagggctatatttattcagtcattttccagcctcagggaaaaaaagcaaaaatctgtcatctccctccttcccccgcagcgagagggccccgaggaaacctgacccccaccttgcaattgttccctgaggtccaggtctgagggagcatagagagtgggtggcccagggctccagctgcccctccctgcccccaaccgcgacagcagcggaggtcagaccaggataatatttatcaaccttattctcattgtgccggactctgaccaaaacccggcgtcactggagatcccagattatgtcttttaaggtcccacagagccgcttcacatgtgcccaattacctctgtcaggcagggggaaggaggtctccctcggtgggtgggatctgaacttgagcttccagaggtcgatggctgggatcttaggcctttgaggctgtcactccccgatagccagaccttttctgttaaaactgtttaaattacaaaccagtaataaaaggatcatatgtgtttcccacagaacaggttctttagggctattatgataattaaaaacatatggtgcctgtaccagtctgaaggaaaccgcagatgtacaaattaggtattatataagggttttctgcttttgcccttttagaaacgtcaagctggagaagtttaaagagataaaaatggcaattgtgcagacagtaggtagcattttggttttagaatcattaaatacataaacccaatttggtttttagactttttaggaataaacagctcctgatatgtgaagaaggtgaggaaagtacccagaggttgggagtttccgggggaagaggcatcattttccacctcacgagaccttggataccatgaaatcttttgcattttctatgacattgttctgcacaaagaggagtatatttattaaatattgaattatgttaaaattgaattgatgggagcaaagatgaggatttctttacattaaactttttactttttaaaaggcaaaggtgcaagtattgattagtctagaaatagtcatttgttttaatttaaaatatgcaattgattttgagaaggtgataaatactgctaataaaaaaaaaactcaggaggatttctatgactccctgtcaatggttttccaaggcagacatacagggcaggtccaatctgctgagcttttcattggaaagggacgtcagcctggctggggacactggcaatgcccagccatgctctggggcagccgagatgacaggcccttagttctggcacagtgggaccccggtgatgggggcaaagatttagggctttgtcagtgcatgtctggtgcagaaaagcaactgggctgctctgaaggggaagggatgggcagcaggtcacaggaccatggtcttcaccagccctgcctctcagggcccctgcttttactgctcctcctgaaaataagttgggccctctctgagacaatccacctagaaccaggatggtcttgcctcatcctgcatcttttccttaatgcgatgagctggtagctgcataaggaagttaaatggagaactaaatgatgaatccataggaatcaatgagcagagaggacacaccacatatccagaagcaaagcccctggagtgctcagataaccagaatttttctaagcctagtgtgcaattgttgaaatccctaataatgagtagagatgaattttgttcaactttttttttgtgttgaggtatatatcacgtaataaattttatgataccctggtgaggttagaagaccccatagccattttttgatcatcctagctagaggaaagtctgggctaccctggagatgcatccattctttgaaatgggctctgcagccgtgttcttgggggaggtgtttggtttctctcttcctccattctcctttgccacaccttcttgatggtacaagaggtctgtcatcctcctgtgccctttcctgtgggggctatgatgggacctaccttgccactcagtctctgggttaggtgaggaagccaacctcctcagggagcttgagatggaatcgaagccagataaacgttcttttttttttttttttttttttttttttttgagacagagtttgctctgtcacccagtctggagtgcagtggcatgatctccactcactgcaacttctgcctcctgggttcaagtgattctcttgcctccgcctctgcagtagctgggattgcaggcatgcaccaccacgcctggctaatttttgtattttctagtagagacggggtttcaccatgttggccaggctggtctccaatgcctggcctcaagtgatctacccacctcggcctcctaaagagctgggattacagagccactgtacccggcccagagaagcattcttgaaccctctgtccacaacacagcaaatagccccgggggctgtggatagcagtggttctcagctaggggcaatgttctcccctgggggacacttagcaatgtctggagatattggggaggggagtgcttctggcatccaggggccagagatgctgctaaatgcctacaatgcacaggacagcccctaccacaattatctatccccagatatcagtagcaatagtgccaaggttgagataccttggtgcacagaggggagaaccaggcctctcagtgaaactccgagttggactcatggtgacaaggcaagtggcgtgccctgccatgcagctcacaccacggcatttggcgtgccccctggacaccctccctccacatcctgtcaccttcagacctcaggcgttgatgaaaaactttgtaagaagccgggtgggctggaaggcaggaacttcaagtggagtaacccggcacgttcctcccaactcaaactggcacgtggggtacggagagggtggcaggtgcagaggcagccgggagccagccttttcttctccctgtgagtgatagcaagcccacgttgttattgtgcacgtagatattaccactttaacttttacggaggtaaaataacaccttgtcactcagcataagtaccaatcacaaaatgaattaattgtaataaccgttgtcaacagaacaaaggacttgttgctttcctaagcagatttcagcgccactgagaactatatacaaacgttcccattggacaggctggcggaaaacagtcagaacataattgtatctgtctatctctttactttgtttttaagggtgaaggaattgagttaaaaacctatattttaagcatatcaataaatatacccctttttgtgttggtgaagtctcctcaaaaaacatggagtctctaataaattggccatgaaaatagcgttcgctgctgatagcacctagaagggccagctgtaggggctgcctgttgacttcaagtcatggagggaatatgcccaattactccccaataaaacaccctcttatttctgggagttatcaaaacacatcctctggacaggtggtcagctgccccccagctcctcaaaggaagataagtgggcctcacgcagggcctgtggagtgtctaactggccccacatcgacacaggcaggcttgtttgcagtcagtctctttacagttacattttatcccctttttttttgattctagtttttcatatcttagcacattttcctctttaagaagcactgtgggtactcttctgacaaaagggtcattcctgggagaggtggtcggcttcagtgggctggttcgctcaaaagtctagttcaagctgtgtccccagtagaggtgaggccattctactgggggtctttgaggcttgagaggggccaaaaggcagaggatggcttttgcaggtctgctcgggacttcagtgaaatataaagttgggaatctcccaaagaactccaaggcaagtgtgtctgacacacaggctaagtaggggtcaagatgcccaaagccctcttcagtgaggatcatgagcaatcatgcccccttcattgaacaaagatgtaaaaggcaacctgggaagctttatctgctttcatgccatggcagcaaagcagagaaagtaacttggaagactcagagggatagaacgactctttgcagtccatgcccccttcttggtgctggccctacatgtttctcatttcttccaggcccacttcctgctcctgcttctctgtgacctttggccagtgtgatcccaacatccggcttcctcccacggtctcaggcccctctcaccacaggcatgagtctcccccacagcatctctggtgccttgttagacagcctgctttatttttagggctcattgaggcctacattgggccctccatgatgaaatgaaagaatcttaggctatcagagatagaagtcatcttagaggtcacatttgatagggaggttggagagaggacttgcccttggttgtagaagcagagacaaggggtggtcttgttttcacgcatccaaattgatccctctgagtgctgtcactgtacatccaagcaaggaaggtgtttgtgtggcttgtccctgcagctttggggcatcttttcctgcagaaggactggccacttggaaacatgggtaagaggtgggcatcttggtttaatgcggccctaactgtcatggtagcccatgcctttggatttgtgtagttatctctagctaggaccaggtactacttgcagaaaaagtactgaaagagcccttctctggaaaaggaactctccctactgcttcctgaggctggtgtctgtgtgctgcgtctcacgggaaggcaggcttatccctcgcacattcatgggagaggggtgttcatcacactaaggtcccaggcccccgtcctaagagcagaatgtgaagtgggggcacccaaggggggcagctgtgggatatggagagaggagaggtgggggcagatcttgtgctgtgtggacggccattctggaaacactgtgacccctctaccctccactccctaacctcacctgccatccagcagccttgtcctggggaacgaggaaacagcattctctccaaatttgtcagaaaggagatgattccatcatggggaaggtgcatggttacttgtccatgtactttagcacatgtggcattcttgcacagcgttggcagatggtcgccaacagagtaatcaagatgacatctctcgtggggcttaccttctatggggacactgacaaacaaacaaacaaataagttcggcataggatgagtgatatgaagatgctgaggcaggaggaagagctggaccttcacatgagaaggtcaggattctataccccagagggcagggaaggcctctttgttgaagggggacattggagagagactagagacagtatcacatgtatcacatggatagagagctagagctcatcaggacttttaatggccatatacaacaaattcacctggaaaacgtggcccaacccttagacatgtgagttaagccaccttggagagaggcagatggttgctcagacccacctgcaccagacgcaccagtgtgcagaaatctgaggggggcacatattctaaggagagggtacaggaaagacaaagaccctcagatgagagaggaacagagttttggagggcttttagacctcaggacccagagatccctgtgtaagtgaacaggatttccaaggtttttccagatgttgatatttcatccaagcttctcgagggccctgtgtggtcaacagagctgggacttggggctgtttttcccatttttatagatggggaagctgatgttcaaagagaaaataatgacttgcattagtaatagtttgtggtagtgaaaggcagggctagggccccaggtctcctgactcccaataccaggctcattctgctaccctggaatacttctgcctgttcctgggactctgatgtgtcttttgaggctgaccagttgtacggtaggactactgggcctaggggaggcatcataactcattctttgcacattccccccattcctggtgaaaagaaaggttgaaacttagaagattggtcatagactttggaaacatgatactatgagaaacacagccatcctccaactcccccaagatgaaggtcttttgtcctcacggaccaagactgtccatgacagagtccatggattgaactacacccacccggtttccttttaggtatcacatggatagagagcaggagctcgtcaggacttttgatggccatacacaacaaattcacctggaaaacgtgggccaatccttggacatctgagttaagccaccttggagagaggcagatggttgctcagacctgcctgcaccatgaagtttcactccatgctgaccgtgaccagcaggggttcagcccctcctggacaccttccaacatgatggccatgacagtggtggtgccacccaaggtgcagaggagctattgccaggacgggcagctgtctttccaaaatcccagtttttgtcagggaaaactgctttcaaataaatagctgtttctggatgattctttttagtatttcttctcccagctggctgttatattgtttgcattgcataccattctgggaggcaaaaggtagcccacctttcatactagctgcaatagtatctatttcccaaaattaaaaggtcaaattaggaactatagcagccttaaaatactttatctgctctcaacttgagaagacatgtagaaaggcttcttttgtaccctaaaactatttgtgatgttctccatgcatgggggtgaatttgcaatgggatcagagaaccagggtaagcatgaaagactgggggaagagacccttcaagaaaagaagccaggatcccaggtgggttcctctgcaaagaaaggcccagaggtgcaactcccaagcccactgcctcctgctgctgagctataccttgccttggggaagttggcttgtgggtggcccccattaggtgctcaactgatgctaacggttggtcacaatagcaatgacctctttccctcactgatgcccaaggtccagccaaagacattgggcttgaatagcaagggcaggattcagcagagacaggcgttgccttaaggcctttctggcttccggtcaatccagcattcttcttacaggggagcttgcatgctcacttagcttgaagcccatgtaatcccatgctgtgaagagctcatgccaggccaggccatgtcacagcaacaaaactgaaggtatgcacttcatcatgatcaagtgtatagatctatctgtttgtatactataatatctatgtatttgttataaaataaaactaaaaatacattttttaatcaatgagtttttccctcctgacttctgctaaatcctattcgatttttttttaaaggtgagaggctaaggtctagcgtggcttgaatttagtctagtgcagccatgcatcggaaagtgatggcaggaaggctgtgggctgtagttcgtcatctgggtttgtcagtctacactgggacaggtctacacagcctgtctctgctcatgtagtccttacctccactccttgttgtctgtgcaggggattactgagttgtcaggaaacatggtcaggaggtactctgcagcagaatttatccattcattcattcattcattcattcattcagcaagcaagcattgatggaacatctctcctatgccaggcactcttctcaacattagggcatggaaatgcacaaaaacagccagaagccctagacctgtgaacctgtttctcctttgctatgccccgccgggcacttccctccatggacagcccctccatgggataggactttgttggcatggtatggtcccctactcccaggacctctcagtcagtggtggctggacaccacccctcccatccagagccttgctctgttggcctcctgaagatgatcctgcccgcccaggtggccaccaccatctattgcagcaagaggagcgagactgagggagtagcgacatctgtcttgctcagtcatccagcaaatatttcctgatggttcctgtgcaccagatcctttcctaggtatcagagacccagcggtccagaaaggaggcaaaaactcctccctgccttcaggcagctcacagtctagagggcagtgggcaaatggaataacgggtaggttagatggtgagaaggctatggagagaaataaggcaaaccaggagttagggagtgccgggggtgctgctactttccagaggtggacagagacaaggcctgtgcagtgacacccagggatttgaaggaagccagtgcgttcctcggaggatgtggggcgcacacttgggtgaggccctgaggacagcagcatgtacagttcagagaactttggagagagaatatgtagaagagggggagggacgggtcacagaaatggcctaggccttgtggccacaagagcgactccggcagaggccagcttcatggggtgtgcgccccatgcagtcccttaaggcctacactgagaagggctcggctcatggtataagggtcaagtgtgcccacattggaattcttaatgatgtttgagccaagggtcctgcatttctcttttgcagtgggtcccacagatgccatagtgcctctgaccctggcttttccaccaggcaggaaggaaagcctctgcagagcatgagacgatttggagagagcaggctgctgggcgtgggggacccatgggtgggaaggtaggaggccgggaaggaggctgttgtggtgactgagcccaggatggaggtccttgttccggtgtcagtgacgatgcagataggacactctgttccaagcctgcgtctcccgctctgtctccttcccccatcgttcctccatctccactgctatctcaagccccacctgggtcctccttctccagagccccacccctgtccttgacatcttgggagccccagtttcatggttgaacttcaatcttttccctctgtcttctttattgacttctttctgacctcctggggaattgacagctgtccagaagctgcagataggctgtgctcttctacgctagtggcgctcatgtctgatactgtgggctggacagccaggttctgttcctggtcatggggacccactgccatgcaccatccataccccctgcctcactttcctctgcagcccacagtgtccagtcccaggggactgggtgctcacagtgaggcttgtggagttttcttcctgcaaatccacctggtccacgtggggactggaggctttcttgtcctgggcaatgctttcagcaactcagccgtcttccaaggggaacagtcagacaagaggatccggcctttcctggagttgcatgtctctttagggaggcactctgcaagccggcacatccctgcctcagtttccctggttcacatgctcctcacagttgtactttaaatactcttttgcctggttttatttgtttgggatttgaagtctgttttttgttgttgttgttgttttgtttcttaaacaccttgataggttttgcaaacagcatcttgaaaagtagctttttgatttgaataagaaatgaaagcaaaagccaccaactcttcaacgattatttattgtgcatgtttttttctccttcattttaataccccggctctttaataccaaaatatcacacatagaagaaagctttaaaaaattagatgggggtggagtggcagttgtggtgtaaatttgcttcatggttaaggccttgtatgccaagttttagtctgaattacatatttacagctgagttataaacccccgaaaaacaggatttatcatggaaatagtgacacaacttcagccagcctggtgttcttgggggttggggtaatatactgtgcagagaagtcagttcattagttagttataaacaaaggacagagatagtaaattagagtaggtatttcagcagttttctgtgtatttacgacaccaagatatgcagctgcattttattccttgagatagtatttaagtattgcagatttaaagcgcgtttttagatatggccatggtacatttttagcctgggtcattctagttcttctgtagttttattcgtggtattttcttctttctctgttgctcattagaaaaatgttaaaaatccattttcgtctgattaataataaagctgatcacatgtaacctaattttcattcagtgctgcccctgtctgtggagtcatatacaaagtgacctttgaatcgccagtggactcataaagtacaataagcaccattgtcctgtcaaaaattgaagatgttttacatcattacaaaatttaatgttccatcttttcaaatgcactacttttcaaaggccacattccaattgaagctcattaaaatcagactcaagtttcctgtggtggggatgaagagagtttcgcaggcaatgggaggaaaatgaatcactcttttaaaacagatatggttacatattagttttgaaaggtacagggatgggagagcctctgttgccggcaacagtgcggcttttgtgctgataaatccaataactgcctcctggttctttttacttcacccaccctgtatcctatttacttgcaaataaatcagctctctaaataaaattgttgttttaaagttcagaggtggaatctgaaggggtttctggagagatgctgtaaagtcagcccggcaatttcagattaaagaaaaaaatgttcctctgactcagagacctgatattatagaaacctggtcactagagagggtttcctagttcctggggaaggttggcccgcgaagcgcagtgttttaactaagagccagctcagtcacccactggggatgggccacagtagggaccctggaattctgagcccaggcataatgcctgccttggcaaagcaaacatccacaggtcttcctgttccagttctttttcggttgtcatgctggacatcttggctttttcttggctgcatctgagcacggaatctctggcctggtctctatgtaagtttttctggctggtccttgggttatacgacatgaggaatgagctcttcccatattgggcactgctcatgcaatggaattgtttaggtctagttttttgcagaatactcacgtgcatcttttgagctcttgaaatactggcctcttcaagaaacatctaggttggaaagttgttcactttgcagagcaggaaggacaacttgaggcccgacactgctcaccgtaggcttgacacccagctccacttaccaggccatagggctctcatgggccatttatcaggcattgggatttagtcaaaagagagttatccaggttctgggcaggctcatttgtaccttaggggaccatttcagagtacaagctttggcatccgctggaattgagtttgtggcccagttctactgctggaggctgtgaccttggtcaggctgcttagcttttctgggctccagattcctcatagaaataataatagtatctacctgacataactatataagattacacatgtaaagtctttaaccctgtttctaagacttagttattgatcattaactgtgagttacaggctagttgttcttttacttatagctagaaaatcactatctgtgttctatctttggagtgtaagagagtttagagaggtaaaacaagaagaagaaaatggcttgcacctgatcgaatgactaatgggttttccatgacagctatagcagttagctactgccgtgttacaaacttagtgggtaaaacaacagcaatttatgttttctcacaggtctttgggtcagctgggtgatcctgctgatcctggctaggctcaactgatcttcactggacttcctcatgattcagtaggtggctaggtcagctggaggatggctggtctaggatggctttgactggggttccttagttctgttctgtgtggtctctcatctccagcaggttagcctgggctcgttctcatgatggaggctcttccaagagagcaaatggaaacgcagaggcacttctgcccaattctgcttgcaaagttaccatcaatcatcccaccggccacagtcacatggccacacccagagtcagtgtgggaggaacctagcagagggcatggatgaaggaggcatgagccttgtaggtactaatgcaatcaatctctttctgtccccacatccccaaggggcacattgagttatatggacagtggtgtggcagggtgaatctaatactttagaagatgttttaattccttcagtctcaggacagcactctggtgagatgttccattatgtttttctggtatgctctgaggtctttcctacaaccacctgctttaccaccactgaacccattcttcccacaaggaaaacttcctttcttctttctgctggtagactctttttaagaaagctgtcttgaaagattgtatggcttcttcacaatgtcctagttccaaaggcccatggctgggattgagcagacgcagttgctgagtctgaaagcccctggcctccctctccctgtcaccccttgctggctccctccctcatcttcaaggtcctctcctgctctcttgccctcaggggatccatgttcacccagtggttctggtattggcaatgcacctgagctgccccaatggccaacattgggtccaggccacagagagccccgggctggggaccccttccctgctgtaccctactcggagttctaggtcccccttatgctttctggtttgtgctacagggaagggcccatgctgaagagacctatggtcttgcagcgagtttctcaaatgctcctcctgcccttgatggatgggaaatggtgtctttcaaggcactggcatccagagtctgaccctagtaggtgtgggtgtactcagcacaactgtggtcaggtgcccgagaagccaagattagtgaggcacacctccacatgcaaaagcaggggctctgtctgtggagtggggtacctgtgtgtttctgcgggcatgccagggagggtatgctgtagtggtgctgggagcaagactctcccagcccctcttccaaaggaggctgaggagctgctgtgtctcagccaatggatgctctggcccagacgtcatctaagccctctgggttcaggctcctatgatcctgtgtggagctgcagaaacaatagggtctcgaggaaattccagctcatcctactcttttcttcctcccctttgggcccgtttctcaccagggtctccacagtggtcagagcaactccagctcctggctgcttggaactctccctgctggtgaccccactgacatcctccatggatcagatgggggcagcagagactgtgtccacaggaagtggacagctgtgactgcaggtggccccagcattttccaagacctgtaggagcccatcggtcctcattcgatctggaagtgattttcctagaagaattgggtattagcttctggaattatgagcaggaaaagcttgctttagaaactccaaaatctgatattccatctgaatttagaaaagcagacctgatcaaattcactatgtaagtaaaactacttatttagaaaaagaaataatagtcaactaataagttcaactacttctcctgcctctaaatttatgatggaaagttagagttgctggagacagtggctcccgcctgtaatcccagcactttgagaggcaaggcgggagaatcacttgaggtcaggagtttgagaccagtctggccaacacagtgaaactctttctctactaaaaatacaaaaattagctgggcatggtggtgggcgcctgtagtcccagctactcaggtggctgaggcacaagaatcacttgaacccgggaggtcgaggttgcagtgagctgagattgtgccactgcattccagcctaggcaacagagccagggtccatctcaaaaagaaaagaaaaaaaaagttacagttgcttgtggtggttgaagatttggctttgaggactggaaacagctcttgcaggggacagagagaggccgagatcagctgatggctgtgtcctttcttgggaggactttctggatgtctgtggctggaagcaggacagtaaagaaaaggagtgggccagcgcaatggctcacccctgtaatctcagcactttgggaggccgaggtgggcggatcacgaggtcaggagttcaagaccagcctggccaacatggtgaaaccccatctctactaaaaatactaaaattagccgggcatggtggtgcacctattatcccagctactcgggaagctgaggcaggagaattgcttgaacccaggaggcagaggttgcagtaagctgagatcgtgccactgcactccagcctggtgacagagccagagcgagactcctctgtgtaaaacaaaacaaaaacaaaacaaaacaaaaaagaaggagttatgtccaagagtcaggaagacactgaatgtcgcaggattcccagtggaatcctctgagggaaaaaagagaggtgagggtccgcggtcctgcttccccagaggtgaggcagcttttggccatgttgttggtagcaaagactcactttcagctctggaagctttggctggcagctgggaaaacaatgtaatctggaagttcagggagaccgaggcagtgacacacaatgggcagacgtgcaccaaagggaggaggccgaagctctatagggtgcctactgccaagggagcctgtgggtgtgattctactgctcacacagttgaaaacaattctctacatgctgcagcttccaattctctacacagctgatgtcctggcttctcttcctagtttctcttttttttttttttttttttttttcagacagggtctaattctctcacccaggtgcaaatgaccagtggtgtgatcatagctcatagctcactgcagcctcaaactcctgggctcaagtgatcctcctgcctcagcctcctgagtacctgggactacaggtgcatgccattatgccaggctaatttttttattttttatagagacgatgtattagtctgttctcacactgctgataaagacatacccaagactaggttatttataaagaaaaagaggtttaatggactcacagttctttgtgactggggaggcctcacaatcatggctggtggaaggtgaaaggcacgtcttacatggcagcagacaagagagggaatgacagccaagtggaaagggaaacccctcatagaaccatcagatgtcgtgggacttatttgctaccatgaaaacagtgtgggggaaaccatccccatgattcaatgatctcccactgggtccctcccacaacacgtgggaattatgggagctacaattcaagatgagatttggatggggacacagccaaaccatatcagatgtggtctcactatgttactcagactggtcctgaacccctggccttagggatcctcctaactcagcctcccaaagtcctgggattacaagcatgagacacctgtctggcctctcactagctccttgattgactttaagtaagccccagacctctgtaggcctaaggttcctcatctgtgccatgaggggtagcactaggtagtccccatgggccttatcaacactgacagtcatgagacctgttggaaggagttcctggtctctgagtggtatttctaagaaaagtgtgggagtcacaggaggacagtccctgagcagaacagggccatgctgtgtgatgctgttgaaaggaccctcagcccctttggcctttctccaggctggtggggagatgccccgggtggctccaacagagatctttctgtctggctgcagtgcagggagcaactgttctgagaggcagagaggccattggcaagccagggtgactagcaggcactacactttattgggagaagggcttcctcggcagctggaatgggtgtgcttttggtgtgtgtgtatgtatgggtcctggcctgcagctccacccagatgcttaagaagtgccccacacttgaacacttccttccagaatcaaggctccggatggggctgacccctagcccctgagtgtcagtaggaacagaaagcagtgctttctgtacatggacccttgaaggggctgtagtcctcatgagggcagcaatcaatgcattcctagctactggcacagtgactagcacagagtaggtcctcaagatattgtagaatagtgaatgaagggatgaaataacagacagatggatgaatggatgaacaaatgaatgaagtaaacaactcttcaagcttgacgagctcggctattgatggagacccgagagccgtgattctggccctggtggtcagaaagggttaatagatcttgggagtattagctggacactgagaaagtggttctctcactcagggaaactgcccattggctcagggtgggatgctactgcttggggttaccaagccttttatgcatctagaatcaacagtcagccctggccaaccacaatccctgtgtgttccaagcaacccagtctcatccctgctacttttctcatctccaacgctgcatcttcctatctcccctgatgtccttccctcctgccctcctatccatcattccaggcccatgttaagcctcacatcccccagcaagtctgggctccacctcctgtatcctgctgcaagtggtgagcagcagctggaaggacctcctctcccctgctccttgtgggactcaggcagataacgcctcttagctgtcgtgttatttacactttcaaatcccccagcagcgggaggataagggatcagtggtaagaaagctgttagtgaaggtgctgtgtgtttagtctgggtgtagtggaaagtgtggctcccccgatggccctgcggttacgctttctttccctgcggtgctacagcactcctgattaaataaaagtgtgtgactctctctccacatggatatatatctatgcaaagtacagttcagagaatgtgtgaagaccctggagacacagcccaaaatgccctccagcttctctctgccaatccatgtccagccttcgggattagctctctttttctgttctttaataaagccttccagagcaacacaggtctccctcctccctgattcatcatcatttctcaagtctgcaccttgcagaactttcctctttgtttgtatgttctaatttagccttctgcagcttaggaaattgtcttttctctcagatcaaaactactttagagacagtcttggttgggtgtggtggctcacgcctgcaatccctgcactttgggaggccgaggcaggagaattgcttgaggccaggagttcaagaccagcctaggaaacatagccagaccccctctctacaaaaatacttaaaaattagctgggcatgttggtatgtgcctctagtcccagctacttgggaggctgaggtgggaggattgcttgagcccagcaggcaagtgtctcactctgttgccctggctggaattcagtggccatgattgtgccactgcactccagcctgggcaacagaacttgccactcaaaaaaaaaaagaaaaagaaaaagaagaaaagaagatacagtcttaagcattttgagaaggcccaagaaataggctaagttgattcattttcagcttttcagcaatcttgacgttggtaggaacagaaagtgctttctgtacatggacacttaaagggactgtaatcctcatgagggcagcaaccaatgtatttctaggtcctggcacagtgcctggcacagagtagattctcaaaatattgtagaatactgaatgaagggatgaatagtagatggatggatgaatggatggatgaacagatgaacaaatgaatgaagtaaacaactcttcaagcttgacaagctcggctattgatggagaccctagagccatgactgtggccctggtggtcagaaagggttaatagatcttgggagtattagctgggcactgagaaagtggttctctcatccagggaagctgcccattggctcagggtgggatgccactgcttggggttaccaagccttttatgcatctagaatcaacagccagccccagccaaccataagccttctgtctcaagcagcccagtctcatccctgctatctttctcatctccaactctgcatcttcccatctcccctgatgaccttccctcctgccctcctacccgtcatttcagggctgtgtcaagcctcacgtcccccaacaagcctttcctgttgacactaggtaatacaagtcttctcccacttgatgtccaaggaactttcattgtctgtaccacataacttgatgtctgaaatatcagtatttgtcacactgcagtggaaaggtgtttgagctaatattttcttttatcccagaaacatacactgagctcatacgtatcagtcaatcagacaagatcctctatatacttcctctaatcccccaatcacccctgccctcctggagcttacacttagtctgtttggatcccacctctgccacttaatagctatgtatatttgggcaagttacaagctatttctaagactgagttttatcatccgtaacatctagctgacaacaacttctctgaaacaggttgcccaagtctcgttaatgtgaataccctctgcttatcctggttccgtcgctggatggaagaaattttgatggacaactaggttgcttcattgttctatagaggcaaaaaggggagtggaaatcccataaatgggtcccagcatgcgctggttagtgagaatgtgcggccaccatgttctattgcatgttagtcacgtaagtcctaaggtcaaccttctggagaggaagacaaatgaattcagaatcaggtggacaaatgcatgtaactgaaggagtaactgacataagagcaccttttgaaaatcaactcaaaaagccatggagtttccttccttccttctttttctgccttcctttccccttctggtacttgatataatttccactattgactatcatttttaaaaaggctctcctggccagccaacttctagaggatggtcataagctggtaagcaatgaagcaactgtaccttctggaaattaattacaggttcaacacagcctgctttttgcccacctgtaaaatagtgtgtggatggagagtaccatgagtattgcatagtatttaatatgcagtcttgtagtccaagaaacacttgtcaacattatgtaataatctatgatcaaaaactaaaacttgtcaacttcaagaatcagttgcattctaactctacaactgaaactcatttaaaagtatatgaaaatcatgaggaagagattcaattaaaattaattgaaagtatggaaaaatgatttgcagtgatataaatcagtacttattgcttactttagcttattctataagggactctctaagaacaactaaaaagatttctaaatgtgtaaaggacaaataacatgactctgtccacacatatcttgaagatttaagaggagctatgatacctttttccttctagatcctcaaccagcctttcccatcattgctacttttctggactgagagacatagcagaaatccaattgcaaagatttttctttttatttttttaacttttgagtgtgcatgcaatttcactgatagcaggatctcagcagagaaattaacttcaataatctatggattacaagacatatcaaaccttcaaagcagtccaatgttagatctattctcagaagggtttaaatggctttaatagttaacaacaaatgatagaatgcattttcccaactaaatcaagatcagttggtattactctcccattctccgagccacttaattatggcaagcatggtctccatcacccatggtgaagcccttgaagtgctcatcccccgggggtgcctggttttgcttcctggcctagcagacatggcaggatccaggcaatactgaagggcctggttagactgtcctgggcagcctgctccagcatgccatcactcatacccttcattgtcagtcgaactattgatcttcagcctcctaaactggagacttcattccctgaaaggattaacaaggacatgttttaggtggcagacttctggggaaaagctccatccctggaagactggccatgggagtggtgcttgcagagctaaacgagtcgaggcatgctttatgagagacgagggagaagcccggagcctgcatgcatgcaaaccctttctgacctgcttattccccattaaatttgcagcctgtagcagtgctcagtctgaggtccagaaggttaagttgaagttgcttctgtaattggtgcattaaaaaggcacttctgtttactaacgtcttgcaatcagttggtgcatgcatggccttgccacttgtggcactcttcttcctcttgtgggagtccctctagatctcataggccccagctgcaaagtgcactcagtcttcatcccagagcaacacgtggcttcccagtgagctccctcaggcggcagctgtgctttgaatcacagatgcacctgctgggctggaggtcacattgttaggcgctgatctttactggctcatatggtggtctggggtcattttggcagacagcaccctagcagaaaaagcagagtgttctgtcacctaactgttgagcatcaccacggcagtggcatgccaggtacagccctgagcccagagtctctttagatacatatgtggtcatgactgcattagtaggaattgagggtcctgatcaccatggtcagtgagggggacaaggtcctacctgtttggccccagttgacccctttgaggaggagattggcagactaaggccagccaatggggagaagcaagaggatgggaggtcctgaagcacatgaggtggcagtttccctgtgtgaggggaccactcacacagggagttgcacacaaacatcatgggaaatgcattcctgtttccattttttttctaatttttctgatccaaaccaagaagaaagtatcagtttggtgctgctctgcctttaacacctctccaacatttgctcatcacagtttttaacccagagagagaaggtcttaggcccagaaccttttcaggcaattgcttctagctggtgtttaataacactctcatgttttcattgttttatttgtgtgaatattttctaattatgttgagtactcctgggcttccgtttatggttcagttatagagcttccttttggaataaattttcttaaaaaataaaaaagaattagttatttttttaagtaaggaaataatagtacaggtgacatgcgaatatggcaagcgtcatagaagcattctaaagacaagcatgttttggaaacattgggatgtgaggtgtggccaaaagaatagagctattcagacttggtgaaagggagctggggtgtttctgaatgtgctggagaatccccaagagacctgagaagagggatttagagaaagttagaggacattagattttggttctcaataggaaggaacctcctattaattatcaccttccaaccctagggccatgcttgggagggctctttgcatcggttaccaccatctgtatttgcatctgctctttgtgttggttgcaaccatctgcatggtttccatggaagaaaggctctgcattgcccgaggtccctctgattccaggattctgtgccctagaccctctgttggctcttacaggccatgaaaggcagcgatgttgactcttcctgctggagatagcaacaatagagccacactttggtttaagaggttgcttgaacaatgagaagagggttttcttttcttttgattattttcttttgaagttgaggagtccacccacaaccatgtttttcttgaactgttgttgctgttgaaaccgattacctccttctactggcagccctcaggttatggatgtttgagaatggagtgcaaactgtttatttgggggtgatctcaggaagcacaggtaggggataaagaaatgaagcaaggacaaaaagcaaagcaaaaagaagggtgtgttaccaagctggtcaccatagtgagcagcactgggggacaaggtagagctgggcttagagtccacccagtggagcagcaaggaagctggggtgttcattcttcaactctgtatccatcattgatggagggttgcttgtagtggaattaaccctctggcacttccagcctgccctgtgtgcagcctgagtgtattttcatcactagaaaaatgtctgcagacagaaattcccaggggttccctctatgcagactttggtgtctaggggtgccatgtggagggggatatgagcatgacacttctagcatctatccccagaggatcatctttaaagatagtaaaatgttgattatatttagaaccagcccactgggctccatccagatgatcctcttttgttctggtgactcacaaagtgtgatggctggagagagctgggcctgtgcctccttctctccagcaggcctgggcggtgttgatgttggccatgtcaacccatggaggttcttcatgggctctgatctggtgagtgtgagccttgaccccctcagtggagggatacttggtgggcgtccttctggcatccatcaatgttggacatggaattgaagaataaacacccaagtgctgttgtcctcacattctggctgacttgtggtgaggggtagcttggcagctgccttatggtcaagcttgttcctcctggggcctctcttcctagggcacttgggccctggtgtcttgggcaaaggagagtgggtgacatgcacattttctgtggcttccaatgcctttcagcaaggctttcttggccttcaaagcctttgtctttcctttgtttggggaaagcaagagcttctttctttgtgtttcaccctgtctctgtaaaaaggtcctatggattttaacctcttttttctctgtgtgtgctatgagcttgcatcacagcctgcagcccacttgcagagctggaagtaagcacccattgtttcagttccaggaggagtggagatgtggggcagaagactggagtccaggtctcactgtactgtgacctcacagagcccctttcagtctctggggccagttcctccagctgcagagtgagaggcttggacttgattgcttcagaggatgcttccagttctggtgtttgttttctgtggttcccatttataaaacaaagcctcttagatgtccagctgttgaagggaaggccagtccttgggaaggatggttgctaaccttcccaggtggcaagaaactggcaaggggcaaagggcacctgcagaaaggagaagaccaaggacttctggtgtggcctgaatcacactggcctgtgcatggcccagatgtgtatggttgggagagcccagcacagctggcctgcttcccagactgttggatcaatgtcaacagacaactgataattcaaagggatgatgaagacaaatgccacccactcatttggtggaagagaattcagaccagaagtagatactagcagaggaaaagtggccatttttcttatatagcaatggttatgtttgagatgtcagggcagggatccgagggtgtccttactgttcacacttgtgcaggactgccactgccttctctcccaggctgtttgtattagtctgttctcatgctgctaataaagacatacccaagactgggtaatttataaaggcaagaggtttaatggactcacagttctacatggctggggaggcctcacaatcatggcagaaggcaaaggagaagcaaaggcatgtcttccatggcggcaggtgagagagcttgtgcaggggaactcctgttcataaaatcatcagatcttgtgagatttattcactaccatgagaacagtatgggggaaattgcccccacgattcaattatctccacctggccctgctcttgacatgaggggattattacaattcaaggtgagatttgggtggggacacagccaaatcctatcactgttccttggccaccccattccactgtttcacagtgtcctttctctctgagtcacagccagctttgatgggttgctggagcagtttgaggaaagaaaatagtttgtgttggactttcaattgccaactataattttattgaaggacaagagaaacacatcccttggagaggggcaccacccttcagaattccttttcaactctacgaaggtggccttggaaaactttctcagtgcagtttggaaagcttagtactcacatactgactaggtatggatatgtttctcctgcactttggaaatcttttgaatatttataaatttaagtatttattttcatattaaaattaaaggtctattgtcttgcaactaacctgccttgttctgccactccaaaacaaaaccttctctagtgtgataacctttatttatagatggcaacaagcatatttagcaatattattattcatgacccttgcactaaatatcataatcagaatacagatgtgcagagtaatttccatgcacaagtcactatgcatcaaattcttgcaaagcaaaaatagcatccattttgggataaattatccattggtgttgtataaaggtatcgaggcagcacaaagggtttcaagtagtaggatatggagagactgtttaaattaaggggtacccaacaccccaggaatgcagtgggattttttttccatttttccccttccggcaacttatttgatcaccttcttttgttagacccatttttaggatgtggaaagaaaatgggtcaggcatgtgggtgtctggatacaaagtgtggctggatgaaccaaggcctcctttgctctaaaccccatctctgaatattttctttatttttgtcaagctaaagatgcagattatcagataagcagcacacccgggctcagctcactaattgactgaacaagacgtggtcacagtttatacaccattccataatggattttcatgtttgtgaatcctaactggctgtggaaatgaaaagcaaatgtctcataatcacaaatatcttctgggtttttttttttttctaagcccaaagattaaatcaactttaccccccatttgccagcaagttcacggttatagaaggaagataaatgatcgggtgatggacatatccgctgtgctactgtttagcaaattcttgtaagtgattgctagatatagcgcatttctcacttaggtgttacatgaataattggtatattaaagaaagtgtgaaataaacaggtataacgcttgaaatgtgtttattattttctgaggtttttcacattcataccatttagaagccatcatcaagtccagcatcttctcccatatacctggagccgaacccttcattagacctgttgtaaaaagatcctttcgtgcaaacgctgtcaggtatttataatgaaagtgtggcagatcagagaggagaggctgtgtgaaaaccatcaaactggtcagaaatacccacaactggaggcctacctcgctccggcctctttctcgctgctctcttccatctcgcagctcctcctggttttctgcttgtcagtatcagatgcaatttcaggccaaccccagcttccttgcgctgtgaccaaaaccctttgtgggcagtgggtctctgagcagtgagggaggaacctcatgaggctgacttcagggtcttcactaagaggccatccactgtgctggggataaattgcccgatttttcagagaggaagagatttggggcaggttctccaaaccttctggctagctcttgtgaattcagcagcagacaggccacacccagccagcagccctcaggcctggctcttatgaatgacttctactttctgaaatggagcatttcctaaaaaggtaggcaggcccagcacacccggctgtgactctttggcaaagcaaaactcttctagtctttggcgaggcagccttggctctgaccccacctggcaagagtccgcgggcaacagagttttgctgtctttgtttctccctctcctccctgcccctcacccacccccttggaaatttaggactctaagaacagagaaaagctatcaggacaagggctggtcattcacccaactgacagagacctccaaggtatcaaggctatctccttggccttgagagctggggtctgccagcctggctggtcttcaggcactttggagaggatgagatggctagattgctagatggagtggacttttcaaagtagagccttgtagacactgagaagaagaggaaaaaagagtctagacttaaagatctcattgattgtccttggagacaagccagcctcagagtctgtcccatgtccccttttcttagtctcatcctctctatgccacgtggaatgtcttccatggggctaccaagagctgcactgcatatataatatcaaacaccaaagttcaatgagtgatccagggacctttctctgcattccccagaagcacaatcaataggcgttcaatcctggagtgcgcagagtcacttgccctggacctcatcttacgtatagctgtcaccatgcccaggaacaggaaatgcctatttgacccagcatctgtccatacacggccagcagccaggttctccttgtgcacctctgtgtactttctgagggcatgtgcagaaaggcaggggccaggccacagggcctgtcccaggctggtttccagggctgctttctaggctggggaccctgggagtcaggccacaggtcctcccctcttctttccctcctcagtctccccctgctccccgtgtgaaagtggtgacctgcctgccgcctttctccctacctccctccagcactagctgctgccttttttgcataactggtaacaaattgcttgactcaccacatgacattgactatgatggattaaatagctgccttgaccagatcattaggcgctcgtctgcaggacacccccgtggagcctgctggagagaggcagggggcacaccagggcaccccctgggtgaggggtcctgctcccctccctggctgcagctagccggcctgtgctgcctcctccctccccactcttctcctgtttcccctgcgagaagccgctgcttggatcctgcattccatttagtgacagccgaggccaacgtctgagccacgctggcacagaggagcagtgcaggaggaccgggtgtggatgtaaggtgtgggattcgaggcaccccctctcctggaaacctctgtcccccagctgccccgaaggccaacccaggggagccatgcctgtgtgctcagtgctgccctggcagcactgagttcttccaggaggaggctcttctgcatcctgcttgggcaggagggacccaaggtgcaggtggctgcagtgggcaccgcacagaggtaggtctcaaagtgtggccaaggaagccagagccaggagaggcacaatgaagttgggccagccaggccagagtagttcagctagtctgaattccaggcctggccctctgctttcactgtgattggagaccttcgtttccccatgtggagctcaggggttggccattgccttattaccctccctccatcacttgggagctggcaacagtggtgaaaatcacggttcttttttttaattattttttaagagatagagtctctctctcttgcccagactggagtacagtgttgacatcatagttcactgcagccttgatctcctcagttcaagctgtcttctggcctcagcctcccgagtagctggcattacaggcttatgaccccatgcctggctattttttaatttttttgtagatatggggtctctctatgttgcccaggctggtctcaaactcctggccttaagcaatcctcccaccttggcctcccaaagcactgggattacagtggtgagccaccatgcctggccagaactcaatgttcttgaactgtggttatttgtacctcgaactgctctcccacccaaaccaccacctgctttctccaagcagtttttgtggatagaatcttctctctggctctttcaagaccccaactctgtaggggaccattgacttgcatagttctagttgggtgggcccagggcctttccctgacttcctggagtgtggagacctgtctgcctcaagagttgaagtctctgaaacaagcctttctagtgtcaggacataagaggcagggaaaggggaaagcaagcatgagagtcccaggggaggaagagggacaactcctgggaaaggagagggggtgcagtggggagcagggtgaagacagggcagccccacttctataggacccagagaagcccccatggacccctcactttaaggctccaagagcatccaaaagggtttgttctttgctttctgtgaccatgggctaattcccaccagggccaaagcaaagatcgtctgcgggacatactgttctttcttcttatagacctaatgtggcagagctattttgggcaacaattaaataaaagccaatttgactaaaaagcaaaatatattccactgaatgacagcaaaagggcagagcttggaaagggaaaggagaaaaaaaaatacagagagagagggagaggggaaaaaaaaagaaaatgcaaggcattcatttttcctttgtattttttaataaaagaacgtctctggctgcttaaagtgacacattaaaagatgtatgtatcgtggcttttaaaaacacaattagataacaccttgtcaaatacttatattctttgttgacagccttgagcacagtgacaatcgcggcacagccattggggcaggtgtctcccctgacacgccagcagcggagtcagccattttacagaaatgttactgtttaccactttaatcatcaatccacatctagtcacaacaataagtcagaaggagcagtaaattatacttgttcagccctgatgagtttgaactgttttgctgaaattaactgaagtaattatctatttttctaaagctgcaaaaagggaaaaaaaaaagtagtaatgttccatggggataaagaatctttgcaaagtagtcggccgtgcaatatttaaggaaactttttttgcgagtgtgtgtgtgtgtgggaggggggttctgatgaccacataggttagatgaggctgtgagatgaggcagatttcatctgctgcaatctctttttttagctaaaaaaaaaaaaagtccttcctgcgaaaggaggctctcttattactggactagcttctctctccacctgatctgaccttttcggggagcccatcgctttctggggctgttttcttttgcaatgctaatagcgaattcccaggttctgaggctttctggcttcctgtgatgttaagtaaaagaggagggaacctttcaattgttacttaatcccttaaatgtgctaggctgaccagtctaggcatttagtcttgaaagatctctgtccctgggaaagatccctgcaccagtgcgcaagcatgcatgcccagttctcaggttcccccaacttctgtgggatggtccccctaggaccctgactgagtcgctgctatttaggtctagtctaaatatatatatataggtctactctcctcaagtttacaacaggacacacagggcatttgtctacttgtgcaatagaatgccacgtgcttggcaaacagacagatggcctgacccgggccatcatgggcatccccctctagaaaacacggccaatagcacccacctggcagggttagcccgagaagtgaatgggcttctatgggctgatgggagtgcaggacatcacagaagtcagcctataggtgatgctctgtaaatctcagtctactgtgcctttggctacacacgaaggcatagtagggttataattaagagcacaatctgaaacctggctcttctgctttgtagctgtgtgatctccagcaatttgcttgctgtcttggtttctaaattagggataatagttactcatgagtgcaaagcaacctctatgtaaaatacacagtaagcgctcagtaatatagctactgtcagtattattgtatgtatatggttgctattgtggtatgcatagttttgttgttgttttatgcatattgtatgcatatttttgttgttgtatgcatatagttgttactattgttgcatgcatttgttattattgtcgtatgcatgttgttattgatatgtgtattgttgttgtgtatacattattttgacattgttgttgtatgcatatagttattgttgtatgcatatagttattgttgtatgcatgttattgttgcatgcatgttgttattattgctatgtgtgttgttgttgtatatacattgttgttgatggtgttgttgtatgcacatgtacacagtacttagagcaacagacacagagtaggcatgcatcgtgaatccagctgctgaaatatcccgccagcttcttgacttgaagaataaaggagggccctgagccgtgtcctcctggtcttgcttctggttgtcctatcttccagcaactcagcaatagagcaggagaaacttcaaagcaccttccagctctatcatctgtgagagtagcctccccaggcaacccaacttagctacagaagctgcagttttgctgtaacatgcccttgtcttccctaacttacctttacagaaggaaggcttggtaccaagtctgcatctagggagagtctctgcagagacctgggtgcccacgaaatcccctccactctgagccacataaataattttgaaagcgcctctataaagccacaccaaatatatatcattgtctagattattcaaaaacctagggactccactttcttcttaattttctgtgtaattaagacaaaattaaagcaaaacaaatggcgaggtgtgggggagggagaatgaagcataattatccactccatctatctagacaactcctatccacagaaaaattgttcactctaccatgttttgatctggataaacatggtgattttaccccatggaacattattttctatgattcattgtgaaaaaccaacaggctctaatctgaagttctaactaaaaaaatactatagtttatatttaaatttggggatagcagtggtttgtttccttagtttactagtcaatttcttgggaaaaatttcttctctcttttcttttcttccttcccttcttcctcactattttttcctccttcccttgtgtgcctgcctctctcactccttcttccctttctccctccctccctccctttcttccttccttcctccttccctccttccctccctcccttccttcctcccttcctccttccctcttccttcctccctccctccctcccttccttccctctttccccatctctcctccctccctccctgtttcctctttccctcctctctctctcctttcctccctccctccctctctcccttcctcttctctctctcctccctccctcacccttccctctttccctcctctctgtctcgtttcctctctcccttcctccctcccttcttcctccctccccctccctccacccctcccccatctcctttcctccctttcccccatccttgtctctctcctttcctacctcccttcatttctttttccttcctcctttccttctttccttcctccctccctgatccctccttccctcccttcctcctcccatcttttgtccctcctttcctcccttccttcttcctcttttcctcccccgtccctcccttccccctccctccttccttccctccctccctccctccttccttccttccctccttccttccttccctccttcctttctaccttccttccctcccccagcccttgtctattcattcgcatatccactcagcaaaccttctccattgagcctggcctgtgtgaccttgaaatgggctgacccagctcagacttgtgtcactggcctccctttacaagacaaggcagagactgcagatacttttctaaccgtataaaaagtgagagttacaagtgcagcaatgaatgcggaaaacaatggcagacagtcgaggacctgatgaggttctgtacatttcacaaagcacatttgtctaggttttccctggcaaccttgaggcatcttgccctattcatggaccgtcttgtggcctcacaggattttcatcttttgattttctgaaaagctgtagagtcccctccaaaattaagtgacaaatctccaatctgagtttgattcttggctgtagattgggtgtgtcgtgtttatgatacaacaatttccacggagtgtcactgggggaaaaagtggtgattctgggtctatattctactctcaaatgctcctagctgtttttttttttttgttgttgttgttgttttttgtttttgtttttgtttttacttttttattcttggagacagagtttctctcgtctgttgcccaggctggactgcattggcttgatttcagctcattgcaatctccaccttccaagtgtaagcgatccttctgccttagcctccctagtagctgagattacaggcatgccccaccatgcttggctattttttgtatttttagtagagacggggtttcaccatgttggccaggctggtcttggaacttctgacctcaagcaatccatgcacctggggctcccaaagtgctgagattacaggcgtgagccaccgcacctggccggctgtttattaatcttaatttttaaaagctacaaccaaaacatgatcttaggtgctactcaaggccagagctaaggagacagggcccccacaggctgaccgtttcatgaatgtatctatatggttccagggttccaggcacttcctcacatccacgtcctagtgtgtcctccctcatgtattgaacacacacctgccatgcatttgagggaggaagagcatggggcatattgtaggtcagcaaactggcgccccggaggaggacatagcctggccagcacccctggtgagctgaggcagtgggtcccttccaacagtggtgcaaacgttcaggcgtgtgtgccccattctgtgatgtgtatgcaagtagctggtaacagactggagcatagcatcagccctttgcagagacctcctcagaaagctcaggcatcaggggctttggctttaagcatttctgccaagcatcgagtgtgggcctcttgagaagagttcttttgttccgttgattcctggaaaagtgaacgcttgttttattcgttgtttttgttgttaattgagcaactactttctgatttttactgatggagttggttagagaaagactttgggtaaaaggtctaaactctcacttccaggccagattgaggttagtgctaagccagaagtgggctcctccccatattccctgtgttcccacagtgaggacgctgaaatctaaattgtgaactctgggagccggaagataccagagagttcacttaaaaggaaacttttatttgacatatggggaaactgaggactagacagctaaagtgatttacctatgaccatattctccattatcccagcagatttttccccacatttctacaagtcccaggcagcaatctgggtgctgggactccagcagtgaacatacaaaaccacggctctctgggagcctgcatcggggtcacattctagaaagtccgtgttcgtgagtcacgtgggcagcagattcatggcaggattaggaccctcattcttagcctgtgggacacagcccctgatgggggagcctgtctgaggtctctgggctacgctaggagggcccacatatggcttcagggactgcaggaaacccctaaattgcatgtaacacttgaatatgggcatctctgccatcagaaggaacctatagatgccatcagctcctcagatgggcccctgactcccacaggtgcttagaaacacttcctggggcccatctctgagaaacacaaagcaaggtgggcagctcgttctcagacctagcagcaagaggcataattatggggaaccagccgagaagcctgctgtcaagacagtttcctgggcaagggtctgggacgggtatgtcctgctgaaggcaacgtggctctcccaagccctgcagtttgcttgtgtgatgctgaagggtgtggtggcaccgtggctaggatggggtattagcaggaccctgagacactcagaaaccccattctagaacttgctagccagggtgagaactgtgtttcatgcctttgccatgtggctcaagggcattgaaaacgtcctctccccacagtcattgggaagcaaggtccactcattcccaacttgcctccaggcaggagattcaagctgtgcacactgcaaacttctgctgaaaagcttcagtccacccattagcgttatctgcagtggtatcaaaaaacgaattagggtgcacaatgaagtattgggttctcactttgatgcaatgatgaggaataggaaggcaggtggatattcacatctgctcatgtgatggaacatctgctcattggctgcctggattcacatccaggtgagtatccacatcctcattggatgtctggattccttctttcttctttcaacaaggctttatggagtatctgctctacgccagcctctggtgaagctggtggagattatatgggaaaaaaggcagatgaagttgctacttttgtgcagctcccattcttgtgggctctgtgctgcgtggatacaaccccaatacatttatttttattttgagctacatttggaggccttgacaaacagcttcccaatggatacccaaaagtcataactggatgggtaatattgttattctctccaagaggttagcctgcttgtgtaaagaagtcagtgatgccgaaagctcaggtcccatggcctggtcctgctaagaccacgtgtgcatattttcatcttgctggaattttggggccagatccaggctaccgattccgagaagttccagggttcaaggagcaacagatgcagggtttgtgctagctcagtctcagattgggaggatcccaggtgccagtatcctgtcaattctgtgcaaaggcggagaggtgttttctgcatggaatctggctgctgtgacctgggattcagggagcaagcggctggctgggtactcttgagagaccttaatcctgcctttgaaaagctgcttaaaaataatactactaaataaatctttacagtggatggaacaagctagacttcggtacccatcccccagacaaacaaggagagattagacgccagagtgagagaaggtattagttgcccatcagtggcatcagtctgtgaggtgtgtccaggtgggtcctcctcctccagcccgtgtgacgttctaccttgtgctttgcagcacaggaaggcagaatcataatcacacaggcatctggggctaatacatatattcaacgtctgccaagtactctagactggaggcctcaggagtataagaactgtatctgctttggtcatccccgaatcccccaggtctggcacagtgcctgaaacagagtagaggccttaagagacacatggtgaggaaaacaaaggaaagaaagaatggatggatggatggatggatggacaaatagcagtattttgtgattataaggattatcaaaacttctggtacctggcttatattttccaagccatagatccgatggagatagcacagatgtctcacaacttttcaaatctctttaaacgaacaaatagaagccacttgtttacctgtaaaaaatagtgtggagtctgtttctgtttcaaactaggtgaagggaatcttggtattcattttattgctactattatcttattgaacactatggatattattgtgcatatgattaaacatataatttaaaaattaattttagaaaggaaaacaaggagggggcaccaatcttgcatactgtgatgggaataaaaatgagtaagttatttgcaaagggtgatttcataaaacaatgtggtacacagtaaagtctctttaaaaaaagcacatgtgatttgaagcatcaactttgtttctagaaattaatactaagcaaataattaaatatgtgcacaggccaggcacggtggctcatgcctgtaatcccagcactttgggaggcctaggggggtggatcacctgagatcaggagttcgagaccagcctggccaacatggtgaaacccagtctctactaaaaatacaaaaattagccaggcgtggtggcacacatttataatcccagctactctgaagactgaggcaggagaatcgcttgaacctgggaggccgaggctgcagtgagccgagattgcaccattgcactccagcctgggaggcagagcaagactccatcttaatttaaaaaaaaagtgtgcacagggtaaaccacaaggatgctcatcacagtgtggtatgcaatagtagaagactggaaacagcctggacagggatagtgatgtactgaatgactggtaagatgctaaaacaataaaatacatttctgtgaatacacatggatggctgccagtaatatgttattaagcttttttttaagttacagaaaatataaatatagtaaaatttatttttgtaaaaatattcacatttataagatttatttattcatggaaacattttgaagtctatattccaagtctatctatatatttgcatattattttatacttttataatgagtgtttattatgtttataatatgttttcattttggaaaatataaaataaaatcacagtgtagccttaacaagaaagctgttgagctttatgtcaggagtttttgtggagtgctattagcttcacaggataactggtttttttctttatgatcagaggcactaactggtcaccacaaaggcctttgatgagttagcatgagaaaagtaatcagttattacctaatagatgctttttcttggtcaataaaacttgtcaacaaattgagtttgtgggtcttgggaaatgatttaaaagcagccagccactaaagtaattaagccaacactcttatttttcacatgaagaacggacattcagagagggcgagtgactggcctgaggttgcacagcaagctcggggcagagtcaggaagccctggccctgaaatcttcgtgcatgaatgactctgcatgatggggcttctggagaagggacagcaggaaggcagccagagtccttccagcgacagcaggttttgcaggcacaagtccacgtagcttgcactacaaagcagatcacactgctggaaccttgtattcattaccttatttaatcctcacagtctctctgttgggtaaggggtctcattatccccattttacagatgggaaaactcagtctccgctggaggaactcattctacatgttcctgccattgatgctgtaggaaggtaatagtggatggtgcgaaatgctttttttgtttgttttcttttgttttaaatttccatagttttggggggtgcagatggtttttggttacagggataagttctttagtggtgatttctgagattctagtgcacccatcacccaagcagagtaccccatacccaatgtgtagtcttttacccctgaccccctccaaacctcccccaccgccaagtccccaacattcattatatcactcttatgcctttgcatcctcattacttagctcccacttctaactgagaacatacagtatttggttttccattcctgagtgacttcacttgaaatgatggcctctagctccatccaaattgctgcaaaacacattgtttcattccttttcatagcagagtagtattccatggcacatatatactgtattttcgttatccactcattggttgatgggcacttaggttggttccatatctttgcaactttgaattgtgcttcaataagcccacatgtgtgtgggtgtctttcatataatgactttttttcctctgggtagatacccaggagtgggattcctggatcgaatggtggatctccttttagttctttaaggaagctgcaggatgttttttgacatcactgtatcttgcagacaggcagggactatcaccagctcacagtccatgtacttccatcacacagattcccatcttccttctatgaccctggcttcagataggagccgtgctgcttcaggttttgagggagtcaaattgctacttaggacagaaagactttggccatttgaaaagcctggagttagaggtgggaggccaagaatccaggtagccagtcttctgtgagatactgagctgaggccatgtccaggtcaccagcaaattgaaagagcagatgttcctggaaaactgcttgagcctaggagttcaaggctgcactgagccatgattgtgccactgcactccaggctgggtgacaaagtgagacctcatctctaaaaataaaataaaataaataaaataaaataaaataaaataataaaataaaataaaataaaatataaaataaaataataaaataaaataaaataaaataaataaaataaaataaaataaaataaaataaaataaaataaataaaataaaataaaataaaataaaaataaaagtgcctgcaaggacacacacacctcttaaggctttgaaagggacctcctcctatttttagatgctacatgctttcagctgtcacgggcaacccataacctctggtcttcatggtgggatgcagtgagttgggggtttcccagatggagtgcagatttagttctgagggcgtgggttggtgctgagccacctgaagtaagcagggcatgtttattccaccgttgggaggccacttcaccagtctttagtcaagaccctgaaggtgtttggttgtcccctttcttaggtgaccacagttccatcatgaattggtaggtaacactttgtgaaggaaacagagaagaatggtcctgagtgtgaattgagttgactcccaggcacaaacgggagggtggctagagtctgggctctgcagacccatcctgtggatttcaatccagcaggggccctgtccagctgtgatcctgagaacgttgcagctcagcttcctcctgtacgtaaagagggctacatcatgacctccatcaaagaagtggctgcataggaagagggttcttgtcaatcctcgaatcatggaacactgggggcagctattggtggaggccccagcaggagaaaggtggagtggagaagggaggggaaagggaggatgtcagaatgtgtgtgaaggctggctctcacgaccccaggccatgccattgtaccaacctggctatctctgcacaatgcagacagcccctggctaaactgtgttctttatctgcaaactgagcagcttggatcaaatgatcccctcacctccctaaacctcttcgacgtagatttttgtcaaacttatttacaaaagatcctacacaataccatcatactttctacaccttgtttatggctgagtgtggctgtaacttgctttcaaatgtttttttaaaaattcatgtgaaacttttttttgttttagagttttttactggtgtaaaatgaggctttctattgacattttgtgatggggatatttttattattattctcattgttaattttaattacgctcttctttgttcatcaatagctttctttcatgtcccctccttaattcattatattttaaaaagtagccgggcacagtgtctcatgcctataattccagcactttgggaggctcaggtgggcagatcacctgaggtcaggagtttgaaaccaacctggccaacatggtgaaaccctgtctctactaaaaatacagaaaaattagctggacgtggtggtgcacacctgtaatcacagctactcgggaggctgaggcaggagaatcacttgaacctgggaggcagaggctgcagtgagctgagatcatgccactgcactccagcctgggtgacatgtctcaaaaaaaaaaaaaaaagtaacatactttcagaaaaaagtccctatgcatatgtgtgtaacatattagaaatatatatgtatatgcattactttatagtcctattatttttgaaaatgtgatcatataatgatcatacaataggtattttctgcactttgctttttttcacttaaacagaatgaggcagatgtagaagtattgactttagtctccagttatattgttaccaggtgcatagtattctattagaccatgtacaataaattatttaacctacctggtattgatgcttacccatacaggatatgatattgttgtgagattttgttatttcatgcaaaacttcaccaaatatcttttgcgtatttgtgcaattgtatttatacaataaattcattgaagagaaattgcaattgattttttgaatggatttgtttggaacaagatttacaaaattctaaatggtatgacaagcacagaagtaaactttttcaagtatcagaccagaatgaatcttgaaaccttcaggagatcactgtgggcagaagaaatggatttctactctgcatcgtggtcctttgtccctattcacctcatcacaggaagtatttacctagggtcatttttttttgcaggtaaacacttcttgggataataagcaggtgaatgtttttcatgggcatctgcagatgtgagacccgggagacttgtgtagggtgatatgatgcataccaaaatgagagctttctggacacgaatccaccagaactttagcctggactggccagggctaatcctacctgaaggttttatgaggtgccagctctttacccagctgtaggctacctgattccagtctgggacctagaatgagccatattggttgatggctatagaagacactggtgtagtgcacagtcaggctgggtgaggttcctggctctaaggaactgggccccagcagcttggagatctagagtctcgatcacatagttcttgttgtgtgtttccaaggggcccagcactgatcatcagggtgaacttatgttgtggaaatctcctgtgattcttgctaaggaagatataggactttcactctccctctgaacattgtgaccagcttccttggtgcctaaggagtgggcatgggaatcagaatgttgccttggagcttggaccagattaaaactctagtgcagtcccttgggagatgtgttgactctcatctcgaagccaggagtcagccacggaagtggagaagtccaggtgacaaaagggcccatacgtgtctctctcatcttggcttgttcactacaacatggtaactgcttgctgaattcgatggataggaacagctagcaaagtgattgcttctagactatcattgcattttctacttttctattcaattgctctccatgtacatagtgcaatcccttgccccatctcagcttctagagagaattaagaatgctcacaaatattaaaagaagacttgtttgaaccccaggaggaagattacattttggaatctgagccttctatcagtcaatagaaaaatggaaacagggtcaaatatatgattcagggaaacccacaaaatagctcttgtctagaatcacctctggacactttctatacaatttctaattacttttttgaggttagttataaggaacttcaaatgtatttttgtagagctaaattctacccctgactctgcttctcaagcactgaatgactggccttaacatctttgaagttctgtttttgcagctggcaaatgaaataatttttgccatggctctgacatagctattgtgagggcccaagaagatgtggtaaagaaaagtgttttcttagctgtaaagttttgaaataattaagaggttaatggcagtggcctgtaatgaagcttgtatagttaggttggccatcagtgttgttcaaatgtacactatcaaacaactccgtgcttcaagacatttgtttattcatttattcatccatccatccatccacccatccatccacccatccacctatccatccacccatctacccatccatccatccatccatccatccatccatccatttacctacccatccacccatgtatccatccatccacccatccgtccatccatccacccatttatccatccatccatccacccatttatccatccatccatccatccatccatccatccatccatccatccatgcatccatccatccatccacttatccatccattcattcaaccatccacccacccatctatccattcatccatccatccatccatgcattcagccatccatccactcatccatccatgtcacagatatttattgagaatctactacatgctaggcactgtggaaagacaaaagcacatccccagccctcagaaacttctttctagtggaagtaacaagcaaggatagtggatgttacaatgccttacaacacattttctcattttttaatgataaaaatgtttctagtttccttagatctaaaacatggacctaaatgataaatgccttttgtgtggtgttgggacaggatagggtgtgacggcaaccatatttccatctggcagggcagttccaagaggctgggagagctgatacttcttcacatggcaggctgggctggcacatttggggattacttcagatcccccttggtggccagtccttgtgggggtctccccctctgggtgggggaggctaagtctgtggatggctgctccatcagcaggtgctattttaggactccccattgggctgatcctggggtgaggtattcccattcaatttctgtttgaatcagaaacagagtggaagcttagccgtcaaaagaggaagaaatggatcttcatgtcatctcaaacttttaagacaaactcagtttctaggcttacattcctagaacataccttctccactggccacccattttgttttcttttaaatgtttccctctgaaccaaggacagccctgtcacccgactgtcattgctgcagagtgtgtgtgtggaggcgggtgggggggatgaggactcagacatgcaaggccacacccagagagagctgcttctagccatgagaaggaatagcatgcccatgttcatgcattcttcagaaatttatcaaaatgtagcctctaccaaatggagcattgtttcttgaagaagctctgttatttaccttcacagtacctgccaaactcgaagagcttggaggcaatcattcgctcagttgtggcatttttgttgagggcttaccatgtgcttccaagtctgggcttccctgccattttgtgtgtagacaacttgtggaaaataggaaggtcgttgttaggatagggttaggagagggggagaccagaagaacccggagccattgggagtccttccaaaccctctgggggtagaataagtgacctgttcatttgacattgcagggcatctatcctccaagatgatgggaagcaggaaggagtctcctctcttcccatccctgtacacccatgccactgtcattaaggcagtggcaacatatgtggccacagctgaaatctcaagtgagggggagccctgaagtgggggacctcaaagccactcagtttgcaaacaggcatcccagaaaagctgcccttggacccctcttatactccttattatattgcattaaaaccccctgctctgttccattgataaagacagaaataaaaggtgttcttcctaatatgcagtcatatgaaccatatttgttcacttaccacataatccttaattacttccatacttttatgtataaagagctttgactgcatttctgaatatgtagtaaactgggtaaaccagaagtcattcctctctctaaatttgggcaatctgggtagggaaggtttagctttagggttggtgacatggcgcgtactatttctgcataaatttccttggagtcattgatccactgagtgtcaaacaaaatgtgatacccacaaaattcatgtatgaccctgacatttttccagtacttaaagtaattgcccttctgtttaataacagtgtttataaaattactttctgattggctaggtccatggaacactcgtgtcaatatctgctgcaaatatatgcctgtgccctttggacttggttttcaaaataattttcatctcttaagcgtggatcagtggcagccctgggagttaggagtcaaggctcctgtgcacggatcttttgctgtttggtcgtgggcattttggaattctcatggcagcttcctgggtttgcacactgaagtgaggatgggtcttgtgtcctctgtgatttctgtatctttctaaagggatttgagattatgaaatgagcagcccagcttaaggatttggtgctcccgaaagaaacatcgtttcactcttttattgagttttatgctctacattttacagatttagaaatgggaaattgtgaatgggtgattcgctatccaagatcaattaagtggagaggagatggtggtaggatctcccctgtccccccaaatccagtagggtgttgagactcttggatataagtaattagatttcaggcaagctctcaagcactcttgggactccatacccaacatttctatccccaagtgacttgcctgactttgcgggaccatcacctctttaccaaccagaggaaacggggtgcccacttgattctcactgaggtctctggatatggagataccatggagagaggaaaacacggcttcccatcttaaaatgaggctgaaccagtcccagggaaaagatccatgtcgttgggattttccattttgatgtaatgacttgtagatctgttaactaccttgtatcttttatgatttctcccagtgggacttccaggaacattttttaaaatgtaccttttcaactttttatttcaaaatatcagattttctaaaagagtttaaaaagatagtatgaggagttacctcatcccctttgcctaggttccctaaatgctaacgtcttaccttcccttagttcaatgatcaaaactgggaaattaactttgatgcagtattacgaattaatctatagaccttgttaaaatttcaccagtggcccactaatgtcctttctctgggccagggtccaatccaggacttcatgttgaatttaattgtcatagctccttagcctcctccaacgtggggcggtttcttcgtctctgtctttcatgaccttgacatttttgaagagtaacagtcagttactttggagaaaaacgctcagtttggatatttgcctgctattttcttatgattagattgaagctatcaattgtaccaaagatgccatgggactgatgtcacgtcctcagtgcatccggtcaggaggaacttgaggtgatctttccttactggtgatgttaactttgggtcactcggttaagatagtgtcctccaggtttctcagctgtcaatttttttatgtttatttttccctttatgatgaaaaagcatcgtgtgggcagatactctgagacaacacgggtcctttttcttttcatacttctgctcactaacgtttatatccgttgggcgatcttgcctgtaacaattattatgatgatagtccaactgtgatttttctatttccctcaatcctacatgtcttaaattcaaattcttctgtaaagaaaagctgttctttctctcctattggttattcattttgaaaaatcagtgtagatgcactgatatttattttatttgatgggttataaatccatgactgtcaatattttgttgctcaaattgtctcagatttggcaattgggagcatcttcttcaaatttggtatgcctccatcatttttaagcactcaggaagtgttttttgttttgttttgtttttacacaagcacataactaaaactgtaccaaaaggtacacttgtataagaagaattgagtctttctcttactccaaactcagcctaaccaaattgagcgaccatagataatgagtatattttaatacattttaatacaaatatatgcattaatttttaagcacagattgaaacacatcatatttgcagttctagactttgtttggttcttttatttatttatttatttttctgagacagtgtatcactctgttgtccgggctggagcgcagtggtacgatcttggctcactgcaacctccgcctcctgcgttaaagcgattcttctgtctcagcctcccgagtagctgggactacaggtgcgtgccaccatgcccagctaatttttgtatttttagtagagacggggttttgccatattggccaggctagtctcgaactcctgacctccagtaatctgcccgccttggcctcccaaagtgctgggattacagacgtgagccactgcacgtggccctgttggtttttcatctgtatattgtgcatatttttccacctcttccatatttttgttattaggttgttgcaaaaataattgcggtttttgccattgcttttaatggcaaaattaataataattgtggagatttcctagttcctttgtagagttctactctttttagagatctactataatttacttaaccattaccctgttgatgaacaatttgattatacataactatatatatatatattctctctttcataactggccacctttaaaggaagggcagtggggactgggcgggggcgggggagagagagagagagagaaagtaggtttctgtagaacaaattccaagaagcaggacttcccaaagatggaaacctttgcccatctgataggtttctgattgtttttatttgcatatctttaattatgagtgacattgaacatctttccatatgtttaaaaatcatttctatttctttctctgtgaattgacttttcatctcatttgcccatttttttcctattgaatgatttgtatctttctcaccaatttgcaagagcttattatatattaaggaaattagcccatttctgtcatttatgttgtaaatatttttcccggtttgccatatgccttttgattttgtttatttttttatcatagtgaggttttaggatttttatgcttagatttatcagtcacgttatggcatctatgacgtgcttgctccttgattttatattaaccccatgttttcttttattctcccccttttcaattttttttttttttttttttttgaggcggagtttcgctctgtcgcccaggctggagtgcagtggcgcgatctcgactcactgcaagctccgcctcccgggttcacgccattctcctgcctcagcctcccgtgtagctgggactacaggtgcgcgccaccatgcccggctaatttttgtatttttagtagagacggggtttcaccgtgttagccaggatggtctcgatctcctgacctcgtgatccgcccgtctcggcctcccaaagtgctgggattacaggcgtgagccaccgcgcccggcctcaatttttgcttttagatccttaaccatcttccttttattttgatgtaaaaagtgaattagggttccagttttattctttgtgtcctttctccaacccaatggctagccaattgaaccaaacaccatttattaaataattcttctttatcccactcatttaaaagccacctttattatttattaaattctcatgtgagtttaccctagttcagtatgctctattttactcaattgacatgtctgctttttctgcacctgtttcaaaccatatcaatgattttgcaattcagtgtagtatctggtcaggcttattcttttttttttcagaattttactatctagttttgtatttattttatgtgatatttaatcttattttaaaattatattccccagaaaatgctccgtagaatttttcgggggtggcagggggaggagaaggtaaaaagctacattaagtttatagatttataggaagaattaatattgttatgacttggagtcttacgtctaagagcaaaatagggcttcctatttatgttgcccagtcattctaaataattgttccttatttagcccctaaattcatattgaggtttatttctgggtatattctcttctctctcttttctcctctctgtccctctctctctgcctctctatctctctgtctgtctctctcattgtatcccattgtaaatcaaatctttttctcgatcatgtttttctaattggttattgtctgggttaacttaaaccactgattcttgtatattcattttataaccagccaccttgttaaattttcctattgtttttaacatcttttttcagcaggttctcataagtattctggtatggagtcatatctttttgcaaataatcataacctgctctttttttaaacaattttagaattcatgcttcttgctccttttccattgcaatgactaatatatttgagagaaatgcgcagtaagagtggtggaagtggacatcctgtccctgacttcagcgtgcatgatttcagcatttcagcatcgagcatctggttgtatgcatgttacagaaatatccttctatgactatttggttgattgtttatttgttttaatcagggatttgtgtttaaatttataaatgcctcttatggaatttgtggagatgatcaaatatttttctctgacataatattaaaatagtgaatcatattaatagattgccttatattaaaacctctttttatttaaggaaataaccctatttgatcaaggcctgttattctttttaatgtactactgctgcaatctccttaaaaatgttatttagaatttgttatttgcattgctgttacaaagcatgattgattgatttttaatattttcgtcaggtttgataaccatattatatcaccttcaaaaaaagaatttggaaatttttcttctctcttttagctcttagagagttaaaatagcatgggtgtcatctgtcttgagaaagactgataaaattaacctgtgaaaacaccagggcctggtgcatttttgaggcagctccctgagaactctttcaattatttttttcatggtccttgccctgtttaaattttttctctctcctctgtggtcaatttcggtaactacccttttcacaaaaaggcattaacttaatctatttaaagctacttgcacaaaattaaatattgtgttattttatatatattatttagtgtttatagttgtatccatgttactgtttctgatttcgtgaatttgggcttcacaaattgaagatacttggttcctcgttttctatattgtgaactgaatgttcatttcacctattttcttgctttcttattgaatagcctccttttttatttttattttttttttatttccatgggtttttggggaacaggtggtatttggttacatgggtaagttctttagtggtgatttgtgagattttggtgcacccatgtcccaagcagtgtacactaaacccaatgtgttgtctttcatccctcactcccctcccaccctttccccacagtccccagagtccaccatatctgaatagcttactttttttttttttttttttttttttttttttttatgagatggagtctgactctgtcacccaggctggagtgcagtggtgcaatctcggctcactgcaagctccacctgccgggttcacaccattctcctgcctcagcctcccaagtaactgggacgacaggcgcctgccaccacgcctggctaattttttgtatttttagtagagactgggtttcactgtgttagtcaggatggtctcgatctcctgacctcgtgatctgcccactgtggcctcccaaagtgctgggattacaggcatgagccaccacacctggcctgaatagcttacattttaaggattatattctccctcctgttatatctttaacccctatgccacacaatttttttaaccagagattctgcaatttccctttcatttccactttatcctgagtaatttctatctttaaaaagtttttaaatgttttttgttttgttttgtcttctattttaagaattaatatctaaatccatatacatcctacacagagactgttggcctatctgtcttaagcatggttctgtactagaattccatgtgagcaaaatgtggtctattgcgttttattccacggacaacaaaaagagtgtttgttttctattttaagcgaatggaattttgtgcatctctattggctttactgtatacattgtgctgtttatttcttcatatgcttcctagtttttaagtacttgattagcgatgagttaaagtctcactattttgttttggtgatttctgctttttaatttcttactttttgtatttgtttttgttttgcttcatattgttctttgtgaatttctttagtgtataatgccccacttaggtaattgggtcttgttcaattgattgttatgaagtgtctcttagtctagttaaacacctgccttaaatttaaacttaactgataaaattatcaaaatctttccttttttcttagtatgtgtttgtgttctgtctttgccaatcattacaattctaatctttctgattcactttaccttagatgagttaaatagacagcataatattttgttttcctttcatcatccaatgaaatggatatatccgtttcactatacatacatccaaagaaaagcatatttttattaatagataagattggcttacttatacttattgatgcaaaaaatgtatttggttctagttctgtgattttacattaaatctttcttttgtctttcttttgtttttgtcttatgttatctgagctttctttgttttattgtgtatgtacttgtatttctccattaatagtatagaaaagttgttgcattttaaatattctaatagttacctttgtatattttcataatactctcaaatctttttgttgatttattactttttgtttattttatttgttccttgttttaatatggaatccataggattctttttttttccttgaaatctaaaatgctccaggattttctaagactctgtttttcaacccaaagtctgcattcctttatttgaggatagttttcttttattacatctttggggttttgttacttttttggtacaagtttaaaagtgcagttttgtataaattctttttgtatttgtataagtttaaggatgtatacatttacaagtgcagttttattacatgaatatgctatgtagtggtgaagtttgagtttttagtgtaatcattgctgaaataatgtacattgtacccaccacgtaatttctcatccctaaccccccattttttgtgtgacttttcaaatactcttttttttcgggtgcactagttatgtgcatgttgaattctgtttgtcttgcttatctttttttttctgtcatccattttagttttggatgtttttaaaactttattttgtttgattggtttgatgggcaatgccttctcctatgaacttcagatactaattttttcttgcctcttttgtgatgcttagcatttgctacctaatttgagagtaacttaggtacatgtctggatccaaaatgagattcagctctgtgaggtcaggaattctgtctcctccatggtgccaagcagcagaccaaggtcctcaaagcagctcaatatatgttcttcattagaaccacagtgtgtggccttcagccagtgttgtccccagagaagggagagagcaatgagggatgaagtagaaagaggagactttttcaggacaggagatcctgcaggggccacaaaggcaggaatagcaaagcccagagctcaccgactcacatgcacacccccagtattccacattccattctgcttttccctgtagtatttttcacacacatgtgatccacttatttctcatgtctgtctatatttattaattccctgctcttccttgcaggaaagcaagctctgtgggggacagaaatttttgtttgctttgctaattagtacctagatcagtgctttgcccatagaaggtgttcagtaaatattttttgaatgaacggaagccaataggtgccaggcaagtgacatgaaagagtgatgtggacttgatatttacatacatatctgtttattgggctattctgctttcacgagcaagagtattttgttgtatcttacttaaagcatgctgccccaccatctcccttttctttttttcttcctctatgcttttttttttttttgtagtgataatttaggtacacaaaagggttcctttaccataataacaagaacacgtttagtgcaagaatacatgctggctgacactcagccagactcttaaggtacaatagggagtggtggggactgtggaaaactggagagcaaatgcctggcctcaaggggcagcctctgctctcttcctgtggtgctgccataagggaaagctgggccggtgttgccacagcaacctgtttttaaaataaaggttctgggtcttcatgtgaaacatcattactgctaaacgttcactcaaacatttttaaaacacacacacacacacacacacacaaatacaaaacaatgacaaaaaaactaaccttctttgggtcaagatcaaataaagcaagctgggtcctggaagggacagtggaactgcctggtggtgacattcacccagatggggaatggaagtcctgcaggttccggtgattcctggcttttcctcctgccatccaggggtctgtgggcaccctccctcctctgagacggcctctctcctgggccactgtgcagagtctaaatgtcatccccatgtgttgcagtggtggctctggagacatcggggtgagctgtctaaaggggtgtcaactcattggacagggtataatttcagtcaacgtgttcctgtcttattttagttcaacatcatttcccagttgcaaaccttttgaatgacacacgaaatgcaaaacaacataaaaggtcctccctccggcagatctgtgtccatgcagaactttaattattctttttgaatcctcataataatgtgctaccccaattctggcaaaaaaaaaaaaattgaaaagtctgatggaaaagatttgtgtcacctgtactaggattccattttattttttataatagtctttatatttttagaagtgctgaacaaaaggaaggggcttctaatcaagagtattctttagatacagagcatcagacaatatttgtgataaatagaaaataactgctctgatagtcttctgcggtgacatttagaatatcacgtttgtctttaggaagtatttttagtcagatttgaagaacagcatctaacatacttgcttggcagggaaggggcaggtggctatgtttagtagttttgagatactagattaaaaaacaaaattttcaccaggaatgaagcagttaggtattattagactttttttccccttttaagagcagcagaggtgtctctcatagatcattacagatgcttcgaaggtctttctggaagtaactgaccttccttctcacatatcgtgccagaattttcattccagagttttagaaagggggtgtggcctctccatgctgcaagctgggtgtacaaagcccagctcttctcagtggggggactcagaggctgaaatcaagcatcctttttttctctccagactcatcaaacagtccatattagatgaaatctgagcccaagagagctccattttctttgaaagctatgcagggtggcctccaagcgccagacctaaaaacaatatctttaaaactgccagccataattcagtgtgataaagtaactatgtttttgttttaaacctgagaacatgtaaagttacaacagacataagctgggtgaggagcagccgggtgggagccggtgtcccacaggctgggtggatgccgtggggccctggggccagcatcaggacatagcccactgggattcagctctgcagctgcttagaggccgggaacctcacagcgtcatctgaaaccacctgtgcttctaggtctttctctctctttcaaaccctctcctcttcaggcttctttccttgattaatttgtattttaaacgaaaacagtttgaaatggtcccccagacagcgtgcagtgcccttcaattcatatccgcactcctcaaaacagaagattaaaaataagtttctggcttctgcacttaaatggaaacctttagtaatcaaaactagctcaccatcaacttcccggcttgaaacgtccatttctcctgctgatgcaagagagagagttagttatttccattggctttcaactgacccttaggcagatgggaagaatgggttccctgttatttatttgggtgttttgggcaatttgctgtacataaaagctctaaatatggcagcagctgatattgccccaaagaaggaggttaataatgtagatttaaatggtgtttagcaaaagcaaaatctcagagacatcagcaaagttcaagtgtcattcagagtctatgaaccagcagtgtttaggggagttcaattttcctttggtttttgggggacagcctaatgcaccaagtgccatcatgtccccccaggggcatgtttggcttggggccatggcagggcctcatgcccaccggtgggtcagaagtggccgttctggatgtgttgttcgaaaacctaagatttggtgccttgctggagtcgcataatagacagcgtcactttcacacctcttaaaagtctttttaaaaatagtccctctagcaggaggcttatttgggatgctgtgctttacacctctgtattttcagactatctggggatgctttttatatatgttgttttaccctcagctccctggttccccgctacgcagctgtaggttgaaggcccagctttgggagtcaccagggagacggggaggtcagatgtttggggtggtgctttggggaggaaaagcaggctgctggccctgacagactcaccacctgcaggccacctcaccggctgcctgcgatgttggaaccccaaatacctcacttccctgacctcctgtatcctccaaggcagacaacctaggaagcccctgccccatcttggacccagaacccactcctcctagagtttttttttttcttttatctctgttaacagcagctctctgtccttctggttttttccagctaaaaatcttgtgtttttttttttgtttttttgtttttttgtttttttgagatgggatcttgctgcatcacccagactggaacaccagtggaacaattggtgtcattcttgacccttctttttgtctcctaccccatatccattccaacagcaaatctgcagactgcaccttcaaaatacagatagaaagaatagcctttgccatctccttatccaccctgccatgagatgggcctagaccaggaacagcccttatttcgttatcaaacagaatcctagctggtctcctggcttcttccctgggtactattttcagcacagtggtctgagtgattctcttaaatgttgcattagaccttgtcactgctatgctcagattcttgggggctcccaatgcctctagagccaaggcagtggccagcaatccccatgcaatctggcttgccactatgccctggctttgagtcttgctatctcttggctctctgccttgctcagtctggtctggccacactggcctccttgttgtgctcaggcccagcagcctcccagggcctttgcatgggctacagcctctgctgctacaatgacttctccatgcataattgcaaggttggtttgatccctcaccttttctgggtctttgttccactgtagcctctcagtgaggcctccctgagtcctcctatttaagatttggaccagccccatcctagaattccctctgcctctttctgcttagtttgtctccaggccttttattactgtttgcatgttacagagctgcaaatgttggggtgttatctgttttgtttgatagtggatcccgtagcactctgaatagtgtctggtactggaggggcctcagtgcattttgtataaatgaatgagtgaatgactaaatgaatgaacagactgactctacagagtcccatgtttcatgggttagagaagtggtgtcctttattggaaatgggcttcggagtgattctggctgtgtggtcatgactgctttgtgtgacttctctgcctctccttcataaatgactcaaagaggtccaggacttgtctggcgtattgtggggtgtgtggcactctggggtgtgggtatgccttgggagccctataatagcatagtagtcaggtggatgggtccaggctcagccgtatgcccatgtgacccctggttgcttggccctccaagttgacccctcctgttccctcctgtctttccagacccaccaggtttcccacacagggtcatctatgaaagcttttagcatctgtctccattcccactgtgaggacctgtgcctgtttctggaatctagagcctgccttgagcctcagggtgctgcccttacctcatcaactgctagctcccctgggaatctgagcccgagcccagaatgatctaacagtgttgggaaagcccttaacacatgcagtgatggcttcctaggtagtaacacttttatgatcatgccatgtattcttgattctgagctaccatcacctatataatgggccatctttggaaggaaaacaataaaaagcctgatctctattgtaaagtgcattattatttcaggcttgttcagttttaaatatgtctggagtcttggtgttgaggatctacagaagcttgggtttgttagggagcagggctgatttgggctcagccatcagggtgtgtccttggaataccaggtgatatggtttggctttgtatcccccacccaaatctcatcttgagttgtaattcctataatctctacatgtcaaaggagggacccagtgagaggtgattggatcatggaggcagtttctcccatgctgttctagtgatagtgagtgagttttcatgagatctgagggttttataagtgtttggcaagttcctcctttcctcactcttctctctcctgctgccttgtgaaaaaggacatgtttgcttcctcttctgccatgattgtaagtttcctgagggcctccccagccatgcagaactgtgagtcaattaaacctcctttgtttataaatcaccaggtcttgggcagtatctttatagcagtatgaaaatggactaatataccaggaatgcagccaggctcaaggagccagcttctctcacaatgaggccagagctgagggtgggcccacaggtgagcataggtaaccaagcacagctgagctctgcccctcacacaataaagggtatgactcactgggccccactctgacctcaccccccaatcagggagtcatgatcacttgaccaacagaggcccaagaagcattggatctcaaaaatcacctatttggattttcccagtgagaacaccattctaatctaggaggaaagctagttaacttgtgttggcctcattatatgtcctaaaatgagaaatgataattattaatataaactaacaatattaggaactaccatttatgaaattatttctccgtgttaggaattataccagaaggttgatattatttgaattattttagtcctgttaagaagcgggcaaggttggcattactgcatccaccttgcaggtgaagaagcagtgtcagataggtttaaaaattcactcaaggtcataatgttgagaggttatgaaaacaagaggcaaaattatctaatctccaggatccctcattcagggagctccccagcccaagtcagttcaaaccgtttctggacagaaacagtaacctggatacacctgcttccatgttctggctcctttatgccatgtaggcatgccatggactctgtgttggtgaatgacatgccctttgggggttggagctgagggctgaatgcatgggggctgagaaaggcctcttgacctattcattcccatgtctcaggacatccttgattaaaaaaaaatggtagctgccctatagaattgaaacggtggcagtggctaaaatattttaaaatgatttttttccacacatgtgggcaagaggttatattgtaagttcaatgctaatcacagttatttaccaagaaaaaaacatccatgtaaaagggcagggcatttggttccaaaaaatgcctgcttgattctgctaccggctgagtctgtctctatggcaaggagccgggcaggagacggctccggccagagcacggggatgataaataactcacaggtgtcagacacacacaagaattatgcgtgtctgacctatgaggggataaatcccacgtctctgccgatggccaggggatgcgtctttaagtgtcataaaaatttagcaattttttccccttcctaattatcttctatatttttgccagatttattaaaataagattttctgggggttattttttttttcttttcactggtagaatgtgctctttagtatcattttacataatttaatacaatttgttccatccattgattttcatggggatacaagctgttcgtttgtgagaaagctggcatcggccagagtgctggcaagacggcacctcgaggagctcattctggttgcaaagttcggtgggggcttcagccatttttaaggcaggtttagtggtgctggagcctgggaggccttttcccccgctacccccacttggaggctcaggaaggaggccgtccgctgccccaatgggctcaggagcaccgtgggcccctgcacgacgcaaggaagctctcccccaacgtgcagtctgatggagaaacacaggtgtttcttaattactcgtgcagaagggaaggggatgctgggcggatgtgcggtgatggtgaccgcgccagatagggatcccggccagcggcagcctgctccccgcacggcccccaccccggccacctcggtgttgcatttgggaagccctaacctccaggctgccctcccgtccttcccgggttttcttaattcaattggggttgtggatattttaggaattagccaaacccctgaaatgtggaggagagacagaatgatgggactggcagtaaggtggggagtactgggctctggagggtgggggctcaatgacctctttcatcttgacagggctccttcctgagcctggaagctgaagggtgccccttgctcctctgctatctgcctccctgtgggtctgtttctgggggtagataaatggttaggtaccaacggaggacatgaaagttctaggctggctgggtgctcacgcctatcatcccaacactttggtaggccaaggcgagagggtcatctgaggtcaggagtttggaaatagcttggggaatgtagggagaccccatctctacaaaaaaaaataagaaaatagtcaggtggtgtagtggtacacatctgtagtcccagctaatcgggaagctgagggaagaggatcacttgagcccaaaagtttgaggctgcagtgagccatggttgtgacactgcactccagcctgggtgacagaccaaggccctgtcaaaaaaaaaaaaaaaaaaaaaaaaaaaaaaaaaaaggctttctatgctggagctggaagacacaagaattgggttccagccctgcctccattgtgctgtgtgaccttggataggttgcttcacctctctggactcttaaataatgacactcttaaattccctcttaaataatgacactcaagttctctgtacaggagagaggggttccgcagattctctgaaggctctcatattctatgatgcgctgagctgtagaagacacagaccagggaggaattttcctgcgttgaccttcccctgacattgtcctgcctctaggggtggcctgagatgggcggaggaccagtgaggagaggcgaagatgggtgcaataccactcagctcagctctgaccctgcgggtgcagcttgcagtaatggctcagcaccaatatgacccacggcctcccagggctgggtggctccggccatgactgcttcttctctgagtgtccatcacgcctcaacccagaacccgtgtcccccgtaccacccctgcttcccgtggggagggcttggaaactgtggctgtcatgtcacacagacagacgggaatgcagcctcctcccgggtggaaggctttctgcacgagggtgccccagacagtgatgaatcatctcccctccagcacccctgggggaacgctaagtaggccaaatgaaatgatccgagctggctgtgggccagggcaacagggctaatccttgcctttgtgggagagcctgggaccagagggtctgccaccagtcacagccgcctgctacgatgctggccccgtggctctgccaccaccccaggaccctgtaggcctcctgactgctccttcaactccctgtgctttccaacagacatacagctctgcaccgaggaggacagaaaacatagcacagcacgctgcagagctccagctcatccagtagtcacttttttttttttttttgagacagagtctcgctctgtcgcccaggctggagtgcagtggtgtgatcttggctcactgcaagctccgccccccgggttcacgccattctcctgcctcagcatcacgagtagctgggactacaggtacccgccaccacgcctggctaagtttttgtattttttagtagagtcggggtttcaccatgttagccaggatggtctcgatctcctgacctcgtgatccacccaccttggcctccctttattttttatttatttatttttttgtttgacggagtctcgctttggagcccaggctggagtgtagtggcatgatctcggctcactgcaacctccacctcctgggtcctggttcaagcaattctcctgcctcagcctccgcagtagctgggattacaggcatgtgccaccatgcctggctaattgttgtatttttagtagagatggtgtttcaccacataggccaggctggtcttgaactcctcaccttgtgatctacctgccttggcctcccaaagtgctggaattataggcatgggccactgcgcctggcccaggagtcacttttaaagcacctaccgaatgcccacacctgtgggagggagaggagactggaccctctgcagctgctatgtatggggcttagactttgtgtggcacagcagggtaccaggtatggagagcagttatcactgaaggcttgctcagtgccaagtgctgggctaagtgctagacaattgccttttatttatttaattttgtttttttgagacagagtcttactctgtctcccaggctggagtgcagtggcatgatcacggcttactgcaggctcgacctcctcgggttcaggtaatcctcttacctcagactcctaagtagctgggaccacaggcaggtatcaccgtgcctttccaattttgtatttttgtagacagggttttgccatgttgcccaagctggtctcaaactcttgggctccagccattcacccacctcggcctcccaaattgctggggttataggcataagccaccatgcccagcctgataattgccttttaaattcttgcaacggtgcaacgaagtggacgtccttattatctcttttgtaaaagaaggggcaaggctcagagagatcaagtaatgctcaaggttacagagctggtgaatgcagaacccgccttgtgctggcctgcctgctggccgcagtgaaagggtgctatgacctgtccctcagtcctcataggctttggcactgtttgtaggtctggaatctgccacgagtttctctgctcctctggctcccctatgccgtttgtcaaccagtgcatccacattcactccattcccttctggggccgggcaggggaaatgccaagggcaggggcagtgagggtccctcctgcacagcagctcacagtgacacaggcacagtggtccctgctcagccagaaccaggtgatctgagcaaccccgtgccatccaaaaccaccaggagagaacacccatttgtgggcagctccactcccttgtttctgccagggagggcattgggcacagctcagccctgactttgagaaagtgtgaacttaaaaaacagctactctctagggaagagagggtcattctttttacaaaagttttatctgcagaatataagtgacagagtgggccggagagcaccaggggctacagctggtaacttgctgggttgggcaggcaagagaggttgaatcggggcattcttcatccattcattctctcattcgttcatttattcattgaacaatattgactgagcaactcatatatctcaggcactttctattaggttggtgcaaaagtaattgcgggtgattgcaaaagtaattgcaccaacataatggatttggaaggcaggatacatcagtaaataaagcaacccaatcctcattctccaggaagtatcccgtgtgtgtgtgtgtgtgtgtgtgtgtgtgtttgtgtacctgcgtgtgtgcacacgtcctgcatttgcatggctgtgtgtgcctgggcatgcaagagcatgaatttcctggaagagaaaggagaccccgggcaggaacaagagcagggctgggcctccgtttcagccctggcccgcagaccctgccagcagcttctgctgagagaggagctttgaaaaatcctctgttctccagaaagccctccttggcacagccgacctcccttctgcctgctcttcctatcttaggggctgcgactgctacccaggctcagtctgggtcactgtcaggacttgctactgggccaaggtcagcagaaacacccacccagggctttaggtgaggccaggctggtgccacggggaggctcccttttattgctctcccagccacttgctgaaaaattaatttgcacgtgaatcacatttattgagaccttctggatcagataacagatgcagaccagcctgttctgcaaggccatccagagaagaaatcctaaaaaattcagtggacaaagggatgtctgctggccgaggctcgctcctagatcaagcccctccctcgaggtgtgcttgtgtgtatttggaaggctcccctggcatcagaggctccaggctccatcctgcaagggctcctggagcggaggctgggccgtgcagccgggcactcccgaccggctctctggattggttctcctgtagcccctcggaagcaaccaggagccggccctcccctccctggccatctgcttgaagcatctggtgatcaggtgcaagccccacaccggagcattcaagctgaaatgtgcagtcaccttgccacccacactcgcttttgttacgcagccaggctgcccctctttgtgtcggggagaacagtttggggatggaaatccgactgctggcactgggaattcaccatggctgagccgagatcctgcaggccgagaggctggcccagtctccagacccggctgtcccctcccaccagggtccatggacatgtctccagcaaacgggttggctttccagagcagggagaagattgctcacgaatgtcttctttacccctctgggtccagcaggtctcagatatttggatcctgccgtaaaggagaaatgcttgtcagttttatgcctccaccattacttaggaaggaaagggtgggttactcccagtgctactgctggcctggactgctggcctagagtgatcgatggctcttcaaggggtgattccctgggttaccagtgacgggggattgggagaaggctcaggacctactcctgaggccgactgcttctgcgctaacccaagcatcttggagggcaacgtgggtgtctgtattgttgaaaacattctgttcttcagctttaataagcacccatcagagagcactcgaggattaatatgggggagttttcatcaccagagagtccatttcattttctgagccactgacgactcagctgagagctgcggactcactgcaccaagaggtgcttttgtttgattttcagtcttataaaacacggcccctcttgccacctccccaaaccactataggcctgtcctcacagctgccagagcccataggcgttacatttagcgttcttctcctggtgggggttcaaggtaaagatctcacagaggacagaatgggaccgcatttgaaactattaactgtgagtaatagttcactggaagaagtctctttgggtttgggttttagtagctctgtgtgaccttaaagatgaaagtgatgtcctactatgtgctggggacgcattttctgttctttctacaatagccatggtcattactctagaatgttgttacatgaagaaacaccaagaaatgtgtctgtaaaaaccagaagtccagccaggtgaggtggctcacacttgtaatcccaacactttgggaggccaaggcgggaggatcacctgaggtctggagttcgagatcagtctgtccaacatggcgaaaccccatctctactaaaaatacaaaaattagccaggcatggtggcaggcgcctgtaatcccagctactcaggaggctgaggcaggagaatcgcttgaacctgggaggtggaggttgcagtgaggtgagatcacgacattgcactccagcctaggcaacagaacgagaatccatctcaaaaccaaccaatcaaccaaccaaccaaccaaccaatcaaccaacaaaccaaccaaccaaccaaccaaccaaccaaccaaccaaccagaagtcctgactaggccccaatctctgtctctacctctcccagtgttaattgtgacaagcagtttgatgttgcttaagtcactgctggctgaaattagtgagagattttattcttgagagacacagagaaattagaaagaagtcaaaatccctgactgactccattagttcatctcaatcccaagttatcttctttaaatgatctggaagattgaattcatgggtatggacaattaaagggtggagagaggaggaagagggctgtggattacagattctagatggtccatgacatgcctgcttgtgagagttctaccagccaagcccttttcaataagatgatcaaagaggaagaacttatcttttaaatttttggaaactctcagcattctataattgatccacttccttagtggaaaaatagaacagccaaaagtcttcaatcttagatactggaatgaaagctaaggttgttcacaggtatagaagaagctgattgtggtatcagatggaatctagctgtcaaacgcttccacaggaatagatagctcaggatgtcgatattcaattgtatttattcttatttttattgtgtattgacaaattctagttttatataattatgaggtacaaagaggagttatggttttaaatacgacgtgggaagattgaattaatctgattaacatatcccatcacctcaaatatttaactttttttataagaatattacaaatttactctctggtaatattgaaatgtaacaaactcaactgttagctatatttgccatgtaatgcaattgatctaaacaaaaattcaaatgtgttcctcctattgaactgaggcttcaacttctggtaaccaccattctgctctctgcttctatgagatcaattgcttcagagtccacatttaagtgagaacacccagtatttgtctttctgtgtttggcatatatcacttcatataatgttccccaattccatccagattgtcacaaattatattagattttatttttatttgatttttaaattttttaaattttttaatttttttgtagagatggggtctcactatgttgcctaggctggtcttgaactcctaggctcattcaattctcctgcctcggcctcccaaaatgcaggggttacaggcatgagccattacacctggccaatattagattttaaacaccccctaaggatctttaattttaaagatgtcatctttttcttttcttcttttaatcagcacatcagtgtaacatgtggtgctatttccctcatgaaacattgcctgtactaagcatgtgcctgaagtgacactgcccctgcccccacctccgtcgtaccccttcccaggagctcaggctgcaggaaggtcgtttccattgcatccctgtgctagctgggcagaccatccctactggcattaaagacccaaatgtctttctctcccgcctcttggtggagcatgaagacaaggtcccattggcttaaggcgcggtgctggctttctccgattgttgtgccgtaagttagcaggataagtttgacagtaatttaattttcattgacaaatgctgtcataatattgagaacaaagtgatatattgtatcaacaatagtggtcgacgctcagccagtcatatggactgggcgagcaccatatggttcttctaagctcgacttggaaagctctggctaagaacttgacaagcttaagataccagtcaggaaaaatgattacccttgagaagttcctgccatgcctccagtctctgaatttcctagaaaaaaggagggagtgcttcctgggtaccagccagggtccaccatacccctggtcggagcagtccctcaagggcacctctgctgacagccggcataatcgaaagtcctgagatgataaaacaccattgatttcctgttggtttgtgtttgttcctggctgtggtcctctccacttaatgccggtgaatgttgcatccacgcgtgtgaatgaggccaggactgaagtctggcccacgttacaaactcacacaatccaaccagaaaggggacgggattttcatttcgggagtgcagctcgttatggctgcatctccagacccccttctgagccaagcagagccagagccatgagtagattacgtgtcagtctttgtgtgcctgggtacgtgtgtgtctgactaaactcttagccaaaatctcagctagatgatttgaccaaaagtgtcaccactgtcaaaagcagtctccatttgttctgcttttctaacactcagcttattttaattctggttactgtacatagaaaaaacaaccgatgagcaaagttacaaacaggctgggagagaagaaagctgggtgtgtgtgtgtgtgtgtgtgtgtatgcgcgtgccccacacgcgcatgtttagggacataccatatccccatgcacattcggctggtgtccttgtctggtttgccaaacgttcaggcactttccattctctgaaggattcccatcccaaacaacgctaagtaaagaaacaggcatatggcgtggattggagatggtgcagtgttggcacagcccttctgctgtggtgaacaggtatctggaaaagatgacagtccaattctgctctttttggagtttatcatttatttggattttgtggttgttgctttgtgtttattattaacttaacaaagagagggagagtgtgcaattcacagaactgggcactggtacaactgctctccaagatggctccctgcctgagccagggctgtccttcttgcaaggcactctcttgtcccaccctgtgcggatcctcggctcccaggcactctggccaggagcaagggctgcctgcaaggtgcagggggagcatctaagtgcagaaggttctctggaggccccaagagctcctgggtgtggctgggggtgtccttggtcttgaaagagagtgttgacttcaaaaagcagggcagattggaggagcagctgccctccttgtggatggcatccgttggtggctgtgtaaagaggagttccggactgcctcccattaccatttcattacgcgacagcagacccatacacagatccatacgctgcctcttggatggggtttccaaacacagcaggacactgcggagagcgcttacctcctctcctgcctgctggaaacccagctccctgccatgtggcgctttctgagctgtggctgcaggctctccccgggtactccagctgatgggtgcccccagaggatgagtgggccgccggagagctgtgcaaggtgccagtggctgcaacgttttccagaagggtctctggagagaatgttcaggaaaacacccagccaaaggatgttttctctcccaggtacctctgggctttggaatcttgcttggtggggcccgggtgtggcgtgtcatcccttcacaatggtggtcagccatgagacatggtgaccacctaacaggagctggcttttcttatctaggctggactcaccagcattttaatgatgagggaaatgagataaccaggtcctacgcagacaggaaaagtgagagggtcattggccctatctgctgattccaggatgggtgatcatctcccccatggcaatgtgggggaagggattggggaccggatgcgtgtcctggctccactgtggctgagcaaagattcccatcctcatgaggcccttgtctcttcatggataaaagaaaaatattgcttgtgaaaaaatgatgatttcccatgttcttcaagtaagaggctccctccttccttcctggggatttatcatctttatgtttaaagagaaaagtccacagggtggaagcacagaaagttattctttctgtctgtttaaacccattttgcgatgttggatttcccccacccatttcgggtgagatctaggcaaggtcccacaatatttttggacactctggaataacgcagggtctttatgtgcctttgagtcataaaagaacctcattttggtcatggaagcacatgtttcaatgtcatactcctaactccaagcttcatgtagagtgggatcattttctggacctggctgcagcctgttgcgggcctggggacgggggcaggccgtgtcttctctggtccctggcctcatgttttcctttctcctgtgcgttctggctaccctggtttcgaacagagtccgcagaagaagtcagggctggaaacacagccatgacagtcatttttctcctgggctggatcctttctggagttctttgggctctcccacatctctaggattctgtcacctacagtttgggcatgttgcctctggctggctgctggctgctagcccttcagcagtgaacatccagtgtcttcctggtgagttgtttcatccttttaggcagcctcttgggcaaagtccttgacagcatttttatgcagagggtccttccatactgacccacatctggaccttgggaaatattcttcatgtcttccagcaaactgaaactggaacctttccccatacaggcctcttttcaacccaccctaagaacagtctctagcctttccactttggcatagctgggtatcatgtcctactgacaccaagggacatggaacaggttctctttgagagtccatcaactgggattgaagtgaaggaagcaacttctgtccatcccctgtggaaggagggctggtaataacatcacacccaccaactctttccaaagaactcttctattttgcaactctctgccttttcaaattatacccttctatagactcaaattgggtcttggcatgaggttgaggacacttgttggccagtcttcattctcaatttggataaagcaagcattcatcctttacgctttgtggtcagacttttggagtttccatctaaagagtaacaaaagcacatattttaacatccttctacccttgatgatcacatagctcttcttccaatccaaacccaaatctttttctagagcatcaccccttttttctcttttgagatacttggcgagagtagagtttattagttttgcacttacaatagcccttctggtacataaacattgattgagctagttgcttctcaccttgcttttctgagaaagactgtgtcttttttttatagcaagggttagacaaaggcagcaaggtatttcgagggtttttttgcaaagctggtgttatgtagacaaaatagattgcctctgtactttgtcttttgctctgctgttggatgtttgggacatcacagcacaacccaaacatccttgtggcttactcatggaccacccagaagtagtcgatgcaagccctgaaaactctttcctgaatgttccagtctgcatcaaacaacctggtatcagctccagatctgttgtgttgacactgcttctggtctctgggaaacactaaggtcaaacttgatgaaagggcagaaagccaggccagggtggctggtctttctcaacccagacctctgatccattttagcatgtctcttccatcagtcgtaaggacttttaaggtcttaacatctcacactgctgtgttagtctgttctagatttgctataagtacctaagactgggtaatttataatgaaaagagtttgaattggctcacagtcctgtaggctgtacaggaagcatgatgttgcatctgctcagcttctggggaggcctcaggaaacttacagtcatggtggaaggtgaagtgggagccagcacttcacatggcctgagcaggaggaagcgtgagaggggggaagtgctatacacttttaaacaaccagatctcaggataacttactcactgtcacaagaacattaccaaggcaggtagtgctaaaaaccattcaagagaaatcttcccccatgatccagtgacttcccaccaggccccacctccaacattttacaattctctacatcagatttgggtggggacagagacccaaaccatatcaactgtttagtcttctgactcactggggagaatttgtctgggcttctgaggggattgtaaggtagtcatgggccagattaggacaagagcaaaactttatatatctttgcagtcaagaacaggacacattgctgtattatgcaaatggaatcttcttccagctaactctttcttgaagtatttcaaaactgtctagctctgaatttcagatattgtactcttagtctcacaatttccagttgatttcttttggcgattcccattttctacctaaactccttatcttgtcatctattttcttaaatatatcaggtatagttattctaaagtctgtaactctagaactcaatatttgtatctttggtaggcctgattacattagctgttgcctgattttctgtctttgtttttactcatttggtcgtatttcctggtgttcctggtaatttttatcaaatgtcagacatggcgtatacaaattttagagatgccttttgactgtatgagaactgccaaataggaatgtaatgtgaaccacccacgtcatttaaattttgtagtagcaacattaaataagcatgaatacatagttaactatttttaagaacgtattttgttgtatttaacctggtgtacccgaagtattatcatttgagcaggtaaccaatataaagagtattaatgggacattttacgtgtcttttttgtactaagtcttggaaatccagtgagtgttttaccctcatagcacttctcaattctgacaaagccccatcccaagttcccagtagccacatggccgtcagctaccctggcaggcagcacagctctggatggtgttatcttcctctagggaggatttacttttgtttccagtaggccattaggcttgcggaagatcaccataagtcaatcagaaattgagcagattttaaggatttatttcttatctgttcttactccttcttctgcccctttaggggtaacaaataagtgtgcggggtgcttatcaggaaacttctgccttacaaagccctagattctggtgtttatcttcttggtcccttggactacggatgtctctgctttgcttctcagcatctcgttggctgccatttgtaagttcacaactgtctcaaggggaaaagcaaagtcaaaagcaagcccagcattctgtgctccttcctttttagaatcttgacctgtcaagtcttggctcctttgataactctattacaccttgaaattatttatatactcacatactggccaggtgctgtggctcacgcctgtaattccagcactttgggaggccgagatgggcagatcacctgaggtcaggagtttgagaccagcctggctaacacggtgaaacctccatcactaccaaaaaatacaaaaattagctgggcgtggtggcacgtgcctgtagtcccagctacttgggaggctgaggtggaaggatcacttgaatccgggaggcagaggttgcagtgagccaagatcacgccactgcattccagcctgggcaacagagtgagagtgagaccctgtctcaagaaaaaaaaaattggttatatacacacaaatacgcaccactgtttttttcatgcagcttttctagttgtgctcaataagacagttgatttgttacaggctcttttactatagccagaagtagaagtaaaataacgtcttaaataactaaaaccagattttcctcccctgtttggcaatcagcactgtttcagcctttgagagaaaacttatttctttacttctgactcagcacaccaaaatctctggggaagaagattatctccccagttctaaggactggcaaattgaggtatcgtaagattgtgcctcgcaagagtcaggcccaagatcctccaggcttctccctgcaccgtcttaccagcctgcaaggcagggaggtttgctgacctggtgtttgtactggtagctcctgaatatccctctgtgcaggcacaggcactccatatcctatatgaagtggtagcagtggccatcattccaggcaagcttacagtttcacagagatcagaggcacattcaaaggacattcatttcttatgcagcatttactaagatgttgtcttataccagacctgggctagggcctcgtgtcagcagcagaatgccgtcattcacagccctgctgttggggagcacgtctcctggggcacatcctggtttggtatgaaggccctgtctgggacatagacacagaatgctgtggacacatgaaaaccctatgcagctgtacacattcccacctgcgtaagtctctagttcagcttcagtaccgcttagttatctctggatcagcagctaaggccttataatatttcaagtataaaatatttaaataaaacattttaccatgttcgtgagataaaatctttagcattaatagaaattttactttttcacaaaaaatggaagttaactgaagcttacttttaatatactacatttaacccaatctgttttacttctcaaaaaagaaatcaacctgtgttttcttgaaagaaaagcaaattctatttttttctgttctgattatttaaaaaatagaaaaaactcccagacattgcttactgcatgaagaatgccacagttttagtttatctcctttcagctttcttcctgtgcctagcttttatggaattgtaatcttgctgtcatatgatttctgcatgtcatatacatgtaatatatatgtgtagtatgaaattttttctcatgttattaaaacgtatatgtataaacgtatggctacactaaaatatcattatatagttatttaccctattgttgaatatgtcgactgtttccaatgtttttattattacaaatataatacagggaatgtctttgaacataaaggcagctcctcttattccatcttcaccctcgtgctttagagtatttctctagggaagaccaccagaaatggaattactgcatcaaagcaatgaaatatttatatcctttttcacttaattttaaacctcagatttactcctcaatgggaggtcacttcccgccaaatctcaaatccaagacaggaattaggggcttctcttggccgggatgtaatgcctgtcccaagatgaggagacctagaggatggcagtagagtggggcaagtccttgaaggtgtttgaggggttggttgtggatggaaaagcgactctgattgcaaagccaaggataatagtacgagccaaaggaaagcctatttaatgagattggccatgcacttgcaggaaaaccttttgagaaaaaagcacagcaaagtttgcgggaccacctccctctgcaatggctgtgttgatgggggccattgctgatatggcgtgggtgttggattttgggaaccgaatcctattttagatgcattgtgagctgaatcctattttagattgactcatgtaaggaaccccgtggtgactctataaatcagaaagttcgtttgcattgcaaatcgccctttcctaagtaatcttcagctccttaattttacaaattgtatattggaaatcttttatttctgtatattggttgttgcaaagtacacttggaggacacttggggcccatttcaaccagggggtttgagggtcttgttgcaggaaagttcttctagtcaatccttccctgggggttgacagtctgtcctccatctctggtggacagctgatggcatttgccttccaggttaagccccagtgagaaagtcactgccaggacccgcaagttgaaggaggaatggacctcaaaagcttcagaggggactgaaatgtgttggctgattagaaggtagaaggtcagagagactagagaaaactcaaggcgtgagctgagcctcgggctgtcattacggagaggaggctgaagtttcagaaggaaattttgatcatcagaagtgcctgcaggaggtcctcgactctagcaacagattagatcccactgagaaaggagagactgttgtgctgcagaccggttgtccagatgggtttcaggagatgatgcaaaggctctgtctgagggtgagatggatgagtcagtcagtgccttctttgagtggatcaaatatcggtagacttggatctctttgtcctgagcacctgagtgaaagaggctgtgtggggggtgagagcccagctccctgagggacacaactgaggtgtctgtctaacaatggcctcagcactgaggctttcttttagccttttatgtcaacaccaaaagtcatggagctgggccttagaaacattgttcaaaagtcatatcttaagttatgacccgtcttgaagtatttataactgattggatttcataagtaaagccagatttgcataaattaataaaatatttcaccaggtagcatcctttcccaagttattggggatcctgtggtgggggaacgggtgcttcttctcctgctgggttcatgaatctatccattccactgggactgtgtcctccatcccagccttggctgctgaaaattgtgctaaaatgtcactgaactttgcaagttacttaatttgctggggtattacttaaatctccaaacctaattggaggtggatgtgagagaaacacactaagacccacactcgacttgggaagatttggaaagagtcccatgatgtcacgtccctgctggggcttggtggaacatttatacaagtatcagtaattatttaacaatcaccttgtcctaaacttttataccatttatacagtgtttaatgtacattgatttcttcattttacatgtagtaattaattttgtcttactgacagatgattctcaatgactgatttcaagacacattccggacaggtactttttaacgcttcgttttgcttcaaaaagccttattctactctggggttctgccagctatcgcaaagcaatttctgcaggggggggttttggggcaccaacctgtgtggaagcatggaggtgggaggtgagttttcacgtacattgtatgttcacttagggtagctttgggtggaagattgggagttgcgttggggggtggtgcttacatctcccccagttaacccttttctcctcttagtgaatattgctttaggccatgcttgagtgaactccagggtattagaaaaagatttctttgctttagaaagcaaagtagaaattcccaaattcaatttgaatcaaaaattggggggaagtgatagaatgaaccaaattgaaaggcaaacattttttgttattgatttcacgtttcgatctctgttacatgtgttgtaaatgtcatctatcccaaggtgaaagcttcagagacaagtgtttaaaatggcagtggagccacagataacaagtgagctctgtggtttaactttacttgttcaagaagtgcttgtccacttcagttgtccctgggagatgttggaagagggatctgcagtcaaaacacagtggggtgcattttgatctgctatgcttagctgtttctctttatatgtatatttttaaaaatttcctccttcctttcattcttagtttgtaatctctaagcatgaattcataacgatttggtttaaagtatgtacgtctccagagttaaaatggagagaaagcctatagtggacatttctttcttttttttttaattatactttaagttttagggtacatgtgcacaacatgcaggttagttacatatgtatacatgtgccatgctggtgtgctgcacccagtaactcgtcatttagcattaggtatatctccaaatgctatccctcccccatcctcccaccccacaacaggcctcggtgtgtgatgttccccttcctgtgtccatgtgttctcattgttcaattcccacctatgagtgagaacatgcggtgtttggttttttgtccttgcgatagtttgctgagaatgatggtttccagcttcatccatgtccctacaaaagacatgaactcatccttttttatggctgcacagtattctatggtgtatatgtgccacattttcttaatccagccttttatttgttggacatttgggttggttccaagtctttcctattgtgaatagtgcctcaataaacatacgtgtgcatgtgtttttatagcagtgtgatttataatcctttgggtatatacccagtaatgggatggctgggtcaaatggtatttctagttctagatccctgaggaatcgccacactgacttccacaatggttgaactagcttacagtcccaccaacagtgtaaaagtgttcctatttctccatatcttctccagcacctgttgtttcctgactttttaatgatggtcgttctaactggtgtgagatggtatctcattgtggttttgatttgcatttctctgatggccagtgatgttgagcattttttcatgtgtcttttgcctgcataaatgtcttcttttgagaaatgtctgttcatatcctttgcccactttttgatggggttgtttgtttttttcttgtaaatttgttggagttcattgtagattctggatattagccctttgtcaggtgagtagattgcaaaaattttctcccattctgtaggttgcctgttcactctgatggtagtttcttttgctgtgcagaagctctttagtctaattagatcccatttgtcaattttggcttttgctgccattgcttttggtggcatttctttaaaaaaatttttttggggggaatcaatgccttggtgccttagcatcagaggatatgactattataggacactcctgttattattaatgaggaggacatgtatccttcattttgcaacttttcatcctcagtgaccttttaaatatggaaactgttgaagtcacattttaatattaatgaatgatgtaaaaggtaaatgaagttcaaattattctaatacttgcatgttaggatctgtgtctatatccatatcttctccacaggcttgtcataactttataagtgtcaaagggatttgagtgtgaagccccacagatgagggccgtctgctagtggctgcagcccacttagcggatggcgccaccctgcagcagggagcttcccatctagacacatatgttctgatgcttttggtcattattctgacctagacattcaccaagaatgaagaaactattcgtttggcgaacaacacgtctgcattttgggaaagttcgccatgccgttgcccagcctggcttcttgctggataagctttgggttggagccctgaggacagcaggtctcagatctagtcaccgtcttctccagcctcctgctactgcattctgtagctctgtctccaagtgcaagagtttggcccctttggggatttctgccattattttttcagagaaggtattcagctctggtttggcttgtagcaacaaaggtctttttgtgtctcacgattcctctcccctctgcctcttctttcatccctgtggcatctattattaccgtaatgtgactaagggggcctttccccctgtcatgtgcctccccaactgtcctggtggaaaatagtatgttcttttttcctttacatccatcatttccacctaagcacagtatagcagcctctggggaaagaagcttgagcctgcgcacacatgttcacgactgtgtgtacacgtgtctaggagcacgaatgtgcacaatgtgtgtttaggcaggagtgcatctttgcaaggtgtgaaggtgtgctcatgaatgtccctatgtaatgtgtgaatgtgtgcatgtgcgggtgtgtgcgtgcttctgcatgaagccatcggtgtgtacgtgtggatgtgtgactttgccggtcagtgggcacagctgttgatcacgcactgtccagaccacagtgctttagctccttctagacattttctccacctttatttgtgttaattactcaagtggcaattagtggctctgccccccttttggtcgcagtctcgtagtatttgagggatggtcatgtattcatcatatttcaataaatcctttccaatgttattgcccttgttgtatcaactggcacctgccctccgacgttacacctgcaggagaattccaccacgtttgggcgcatttccgaagcaaggctattgatgttgtatgtttaaaaaaattaattaaaaaaactcagatctcgggaaattccagcagtcagtctcctttttttatcctaatctcttcatagtaatgctcacaagtacccttggtccagacaattcttcattcattctccaccccccaccacactcacacccaaactccccaccgctggagattagtcctttgtgagtcagtgcacaaaagctttcttaaagtcccagtaaattatacccctggtttccctcttgaattcctttttgttactttttcaaaatattctattagttttgttacgtatgatctcccttttgtgaatccatgctgaatatctttaattaaatcataactttccctattttgtccctgattagtgtttccaatatcttccccactgctcaagtcaagcttactggtgtttaatttctttgatctccctttgagtcgttattaaatataggtgttgcataagggctcttggccactggtgcttctcccgtttccctgggtgtttttaaaaggtatttgctaaccgttcccctgtttccttgcctcttcttgcacaaattctaagatggttcccatctgctcccggagttatcagtccttagacactctaatttctttctcacctgttctgctactaggctgatttccttcagaaatattttcctctccctgggaaatgcttgtctgttgctggcatctgctttcgtcttccctttatggacatgaaagcaaataatttatttttcattttctctagaagttgtcatccctccttccaatcaactatgttctatgtatgcctccttgtgttttttaaaagagcattataaacccagttccagcacctccttgctaagaccccaatttggaagtggtatttcctttccaaagggttgatagcatcaccaacttttaatctggggcagggagtgctgaccctttgctagcgaaactgttttggatgcccccagctgtcctacagcaagcagcatgaagtcttgaggcttccctgacaaccggtacaagagggacctggccccatctccgggttttagggagttgtgaagtttcccacgtgtcgctttggaaatctctcatatgaagtcagcttcagccaggaagcttgccttcacttttcttctgctcagtgcctccaattttcctcacacctgagggatgcatcggttctcctatggctcgctccccttcaggctgtactgtgggctcatcctcagatggaatttccttccttttctgcctgtgttcccagaacacagactaaaaagggctgctccatgcagaaggtgcacacccacgggctttcagatgctcttagctgcaggtgccctgtcaaggggctgggcccacaagaagcggttccgagtccccaacctgcggccgcgtggaagcctcctcagatagcactgttcctctcagcttgacctcatttccttttccagtacaacccagatctgcgtgctgagacatcactctcaggttgtaaattctacaccaaatcaaaaggccaaatcctttctgcaaacccacaggcgctcgacctacatcacaccaaggagcctggccccgatggctatctcaggacccctgggcaggggcagcagaggtgtgagcccccacccctccagcaccagctactggccttctgcaggacagcaacttccccggatcaagtggcagaaacagcatcagccaacgtttccacagagtatgagtcataaatagtccttttcacattgtttcacatcaaaaggcaagcagcctgtgctgttccccgtccctcatccctaacatagaagtgcgtgaaatttgcccacaaacaaggatttgaaattttaaaagctcaataaaggtagtcaatagacacactccagtcagtttttaaaaagtgtttttaattgggtcaaatagcatgttactttggggaaaaataaagatcatttaaactggttcttttagttcacatgtttttgaaaactgattttctggtgcagacctagttcgaaatatcatccggaagtgctgatgataaacgggtgggcccagggttccctctgaactttagggggttcttcttcactgtttctccgaccactgtttcttcactgaaagagtctatagtctcttcacttcagggcgatggggtaggacggctggggtcctgattccatagttaaccaggatcaaccctgggtcttgagccacctcactgtatgcccgacagctgccccagacagggaggacagtcctctgtcagcctctgagcaatgttccagaagcaatttatagatggacttggtgagcaaaaagtgagagtcacaggtgcttcataataattgcttgcacatttccagaatcggacattctgtcatttaatagacctaaaactaaaaagcttttgtctgtgaaaggtgaccagtagaaacagcgtttggattatatgatatcccataacttaatcatatggctcttaacagggggacatacacagctgtgtctcactaatatgcatgcaatatgtgtaaactgatacgctttaattctaaacttgtttttagcaggaagaaaaaagcatttagatgaggaacattaagattcaatattaaccattttttcccctttgggcaaaattattcatcacttgatatttattaaagcagcattttccttttttttttttttttttgctattgtgagatgcatcctgctactgattttccaaacatcctcaaagttatgtggcaaagtgaaaaagacacaggaacagccagtagcccctttggggtcacaggaaaacaatagacttgaaagatacacacttgttcttttgaagcccgagagtcatcctaacccctaggacctagtgacaggggcaaagttggagtaattaatttagaagggggctgactggttttccacctctccaattacacatatttgatttgcctatcctgtctgacgttttaattgttagtttatactggtttaatctgaaatatttaagtatatttgctttgataatcttaactaaaaaaaaaaactaagacaaaggaattgtagattagagactttattttcagggcaaaatgatacgggtaagtgaacatcaactgaccagaaattatttgcttctgtctgttagacacgtaatggagtcatttaactagtcaaattaggagctgcagaaatgcaccatgcttcattactgagttcgaatgggcaccattttacatttacgtcaaaaattatctcatagcaaattaatgttttcattgtgcagaaaggctgaagctatgcagtgttagcggcacctagaggccattgcgaaaatacttcaaagggatgatctgcaaacaaggacaaaatgatcaatagatgagtggtggtggtgagagccctgaccccgtttgaaagtaagagtagtcattgaatcagattggctctcttggtgaccatatgaagctctgaggggccatgacggttttcctaaacttggcctagaactaaatgtgctgaaagagccccaaagatttctctccttttcttgttactctttaagtcctgaaaatatctgtttttgttttgttttgctttgttttcacagtttgagtttgctttttcttttacctatgggcttacattatatcagaatctcatatgttagccgatgagcatttctgtaaataagcaaggagagattttttttcctcccacattgtaaattggcatccttagaatctttcttttgtcattggtaaaaacttgctgtccgtagaaagaggcaacacatgacactgtttcatcttaaaaaatactgaactgggtaaatcctccatccaaacagatgaccaaggttggttgttgtcccaagaatgtcaatctctgctcaatttagcgagaaatcatgttaaatgaaatggcaaagccctcaccaatgaaaatatgtgttaaaatgatctgcaagtcgtcagtgacgctgggacgttggagcatactgtcagagcagaagcaaaggagagaatggaagcatataaatagcattgagaactcgagaatatttcaagacaatattgatgtctaaaatatatgtgaatgactgcataatgatcgaggcagacataattcaaagtacagtcagaatctggcctccaactcagagctttaaattctccaaaagacatctgtttgctgagaaagcctcaccaacagctgcgccacataaaggggagaacccgggataaggttgggagttggcaggtaggggagcctcagaggggttaggtggggtcctggagggcgggcgcccaccttcactccacaggtaccggaagcggggctgctttggacaaaggcgagggaggtgcctgtatttcctagaaccaggtagcaaatgttgcctgtgtgtttcatcagaaagcgccccagttgggcactgtgcctcttggatgctgacaagaagatttgacgttacttctctggtccttaactttgtttacccagctgctattcttcccatacttaactctttcaccgtgcagaaagcaagggggagggaggaagggaagctccaggtgtgatttttcagaacaaaatataatgctgtgatttatttttaaaaaagagaataagcacgaggaaattgaatagcatccatttcatgcttaaccgtggttcacaaatgatagtttgtaattaaaattctgtctgcaaacctattctgcagaccccaaaagaaaacttcctcagaatgttatcaactctccaatttctgtaaagatgccatattttcagatttcaaagagaggatctccttttgaaaataaagaattgttgggtatcgtatgagcctgctaagtacagcattttaaacccacactgtgttgaaaaattcaagaatttggcagtgaccttaaggccacagataggataatgaaaaatgaggcgatgagggcagtgtctaaaggaactactcttttgttctaacagaagctttgtgtgtgtgtggcttaagcaagtggttcaatagaatttctttgaaacagaaacaaaaatgctaagagctggttacaagtactctggtcttcttttctccttaaaatgcaggaagaatttttacctcttctcatgaatcttgtctgctgaaatgtctcagtcttcatgttatgtttaccaaggccaggccagaggatctgataatttataaccattcctattgggttttatgtaataactttggaactcatataaagtaatgatccacaaactcttttaatgttcattataaaatatgaaatatttctcagaaccattgcaattatgtgaccagacataactgtttcacacatgagtaaatacagggaggtttaacataactttattatcttgctgtcttttcttctcattgatgtgataatactgttttaatatttttctaaagaaaagttaagtaattttagaatctctactgaggcccgctttattggcttttgtaatagaactctcaaatctaattgtatttatgctcagactgacaccactaaatgtcgtgaatggaagggaaatgccccccaaagctgtgtattctgtaattatcgatagatgtgtctctgctgacgaggcctggggatctggggagagtcacgcaagtaaagctgagatggcagcaggcatttccaccgtcatcctgaggcccccatggatgcagagaggtgcttttctaaggagtgaatgagccccgtcattctgtaggactcaccaggaaacttttccccctttactgtgtgtgctgtgtctgcctctcctgggtctggagtcagtagcatgcaacttctagtttcgtagaaggctgatctccgaagggaattttcctgggcttcctgtcctagtgatctgagctgagtggcattgttccggttgcttgaccttcacctggggcgtgggcttggggtcatccctggtggctgtaaagtctcctgcagcgatggaagccagagagggattattctggaaacccacttcttactccccgtgtgggcagtggaagctgtaacaccaaggcggggaacccagtgacagtgctgcatccactctcgatgccccgtcagaatccaggatcctcccaggaccgaatggcggctatttctagcctagtaaggttgggtggaaaagattaaacatgagggaaggtgccgttatctgggcatttccaagtcctggagaggagagagggtttcaccatgcttgactcttttatcttacttgtttttagacaagtgtttctcaaagtctcatgtgcaaccagatccccatggatcttgctatgatgcagattctgactcagtagttctggggaggaccctctatcctgcccttcagctccagggtcatggctgtgctgctgatccagagaccacacattagatctgggtgtagcatctgtcttctcactgcacatctgctttcggggagacaagcagacacagggcatggaaggttaggtggggccctctgagaggcctatgagtgcaatgaaacttgaagagtggcctgatggctggagccagctcacagttgggttttgtttgacttgtccgatattacacttttgctttcaattggttgcacacagtttaaaaatgaaagattttttaaatttacaaatccaggctttcaggttctcttgaaaaactagaatgtctgggacaagagatagaagagaggtgggatccgctcccttaggagcagaggatggaagagaggtgggagccactcccttaggagcaggggacggaagagaggtgggagccgctcccttaggagcaggtgatggaagagaggtgggagtcacttccttagggaggtgtggctcttcccttctccgccaaggggtcccgcccagcctgccttgctcataacacaagagtttgcagacagggaagttagaccccaggaaaagagggtcacttccctggcacacacagggcatgtgcaatggtggaggctgcgtgcccccctgctgctggctcttgtctggagtttgctggaatggagaactcttgccccatcagaacccaggactcacctgcgtgctttagctctgccttctggcaagtgccatcttcctctttgaggagctgttccttagctctctagttctcacaagcaagccactagagagggtgcaattcccagctaattaaaggtcttgagatcctcccctccctgtcgccgacgctcctttgaaacaagcgggctgcataagaagtctccctggctgctacctggcagcaggtgtgagccaagggctggtgcccaggctgcgtggggcccagtggggagggagcctgaccttcacctaggtacatccaacaggtgtgaccgcccggcatagtaatcacccagttcctaggtgggcagtattggggatcatcacaaaatctggaatgttcattagtgcatgaaatcatctgatcatcttcccacttggccctcttcactcctcaccaccccccttattcacccctcaccaccccccttattcaccccatccccagtctctcctggaaactggtgggttgcattggagtcagatgtggcaaaacacagcctaagtcaacattcgtggttcctaaagcgaaagaactgtggaatgcttgtattcaaagatttctccatgactgcacctggttgagtgatgaaataaaggtgaaaccaaaaagacctttctgcttccctgggcggtggctatctaggtctttagttcttttaaccgggcgattgttgctgtaatgggtctcagtgctactggggcactgactgaggcttgttttttttctccatgaagaccaggaacccagtgccctggaaggctggtggcttaggtaaatttgagggctgggcttgagccaggctctgctgagctctacacttcagctgtgtctgccacccaccccccacacacccccccatgctgggcaaagccaccgtgcttacagcgttgactttctttatccccaagcagcattcagggctaacttttcagaaatttttatttctgaatgctggttaaaggcaggatcttctgctgccaaatttctcaagctgtcacctgcacagtgaacaagtgaggagtggcctgaggcacctggctgtgctcctacaacgaagcactctgttcttagggactttagtactgggtacatctagggagttaggaggactcacaggacactcagattgacagctctcagcatttggctgctggttaaataaatctcacatgagttaaaatttctacatgttctcccatttacaagacagagtaaaatcagcacttaatgggtcttgtagagtattgcaatgacagactgcataggggtagccgggtgactgcaagagcttcctgctctcttcatcatcttctcagagagctttgctcatttctgtttttgaatgtgaataaaagaatctattacatattacattcagagaaaatggtacgtggtacccaattgtggccacatgcaaggggaatgccatactgagaacccagcatgctgattggtatagggagctggaagtcattgaatggggaagggctggaagaaactgagggtgaactcagccctcacttcaaaggagtttgccgtcaactcagagaaatggagctaaaccatgcaagctgcattgctacccaagacatgggtgggaagggaatgaggttggggaatagggcagaattgagctgggcctgcaaagatggggagggtttggctaaaacctaggattttacagatttatccaagggaggaatctagcaatgatctccttttgctctttagtgtcttttcctctggccggttaaaattccctgttcatgttggcttggtggcttacacctgtaatcccagtgctttgggaggctgaggtgggaggatcacttgagcctaggagttcgagactagcctgggcaacataatgggaccctgtctctacagaaaatgtaaaaattagctgtgcgtaatggtgcacacctgtagtcccagctacctgggaggctgcagttggaggatcacttgagcccaggagtttgaggctgcagtgagctgggattgcaccattgcactccagccttggcaacagagcaagaccgtgtttcataaaaaaaaaaaccaacaaacccactttcattgacatctgcatgtatttgagagggctcaaaaatgaggcaagtttttgcttctgcagcaagatggagttctagagtcctggagaccttctccttggttcctctccagtgctgtccttggtgttactcaaaggaacaattgcctggtcttctgaattgggaactacttagaatataacagctgtgctttatatgatgaatttaattcttttctaatgaattttatcagactgctttttggagcacatactggaatatggcagtgccggaccattttccatcataagaaaataaattaacttaggattgtgaaatcacattaaaacaatatgaaaactctgccatgcttttggttatccccttggctggagcacgttgcaccatctctaccctgctggaaacgcgctgtcactctgtctccctgtgccctgtgcaacgatgctcatggaactgttggctgtcaatgttgttgtgtgtacaaccggagcagtgaggttagttcctctgcagcacactctccagagagtcaaaggatgtcattcccttctcggcagggacgcaatcatacatctgctctctggtctgtgacacctcactgtctactttggctgtgtccctgggcagcaatgcctgtcatcattttatgaggcacaacagaaagcctggttcactcctgacactgcgggacaggcaaggccaccaagccagtgtcattaggtgcccctggacttggagggcctcattctgatgtttctgctctgcacggggtcagtctgaaccatggaaatcgcaggggagatgcgagggctgggagcatggcctgattggaaattgagaacctgctttgaaggcctttctttcctttagttatctccttcacaaagcctcctcccggagttaattcacaggcactcatggccggcccttttgcagggacactagaaagaatcagcagggtaaatatttcatccgaaaccacagagatgctggcattgctggtgtgaaaagtgtagaaagaatacactcaaactatgtccctgcgttttcccagtggtatgtcttgaccacatgtagccagctggaccctccaatccaggagcaccttagaaagtcagatgcatctaacagactgggggagagctctggagagggtgctatgtgggtttaagctggaacgtgatgtcctgtaagtcaccaaaactgcctcagctttagtattctctgtgtaatgactatgaaaatagaatctacctcaaatagttaatcactctacagacttggagagtccacaggcaacgaggcttcagggagatcactgagaaagcagcaatgtccaagaggcggccgccagcagaccctgtgctaaagccacctctcctgtggcagctaggagaccagactctctcggtattcctgccactgctccgacaacgtcttgatctttcctactgaccctctctcccttctttgctcttctggccctccttggggctcagccccgcttctctttctcttccccctgcactctcttcctggaaggactcatccttccttgcagatttcatgcctctcttctgctgatgattcaaacaggcacttgcaactctcttatcttctccagaatttcttctctgatgttctctttgacttctccactttgacatctaacaacctcaaacctcaaaacttgcagttatccttgatttctcctctctctccagtccaccagaaagacctgttaattccatctcaaaaagaaatcaatccagaatccttcttcccttccatctgcaccctgaggaatgggtgtcatctcttacctggattatgccaaactgatctaacagaccttacccaaacgtttttacacgcttcagctagaaggaacttctggaaatgtaaatcagaccatatatcctcttgtttaatacccttcaatggctttccattccccccccccttttttttccttcagatcgtgtctcgctgtatcacccaggctggagtgcagtggcgcaatctcggctcactgcaacctctgcctcccaggttcaagcgattctcctgcctcaccttctgagcagctgggactacaagtgtgcatcaccatgcctggctaatttttgtatttttagtagagacagggattcatcatattggccagactagtcttgaagttctgacttcaagtgatctgcccactttggcctcccaaagtgctgggattacaggtgtgagcaaccgtgcctggcctttctgttcccgcttgattaaaacccaagctcccctcagccacaatgcccagagtgatcaggtcattgcccaaccttcaagctcatctctcaagctctgctccaacccacagatcttctctccgatctttaaatcggtatcccagctctttgctgacacctcagggtctttgaatatactgttctcaatgcctggaatgaatgacaacctctctctgtcacacacacacacacacacacgcatacacctggctttgcctggccaactttttctcattctttgatgatttcttaccttccactcaaaaatggctattcctctgttattccctctgtgggtcccattttaacttcttagcagttattaaaaattatgtgtgtttgacttcttcctctttttttttctggtctgactctcccaccgaattgaaaactctaaccagtcagaaaccatatctgtcttgttcacagcttagtccccttcacggactacagtgaccagcccagagaagagaagaggttcagcacatatttcttgaatgcgtacataagaaaatatacagagacataaacttgctaacatttggcctagttgttaggtacataagtaaacattcatttttactcctgtttaaaataggtttcttgtatctgggcagtttgtcagctctcaggtgggtccattagggatgttgaagttttgctgtcaggaaatctgattttaccgtttgggtggggatttctcagagattcttgaactctttggcaaagctggtggtgatgcagtgtattagtccattcttgcactgctataaaggaatacctgagactgggtaatttataaagaaaagaggtttatttggctcacagttctgcagactgtacaggaagcatggctggggaggcctcaagaaacttagtcatggtggaaggtgaaggggaagcaggcacatgcttcttacatggccagggcaggaggaaaggagggaggtgggaggtgccacacacatttaaacaaccagatctcgtgagcactcactcttgtcatgacaagaccaaggaagatggtgttaaaccactagaaaccacccccatgatccaatcactcccaccaggtcccacctccatcactggggattacaatttgtattagtctgttttcaagctacagataaagacatacccaagactgggtaatttataaagaaaaagaggtttaaaggactcacagttccacatggctggggaggcctcacaaacatggtggaaggtggaaagcacgtctgcatggcagcaggcaagagtagaagtgccagcaggggaaatgccagaagcttataaaaccatcagatcttgtgagaactcactcactataaagagaacagtatgggggaaacagcccccatgatacaattatctccacctggctccaccagattattacaatttgaggtgaaatttgggtggggacacagccaaaccatgtcactatttgacatgagatttgggtggggacacagatccaaccatatcatgtgtgcaaagtatggcctatagagtgagcacttggactcacctttctgcagagtctgattatgttcagtctttgctcctaccctgtttgacacaagggtgtgtgtgtgtgtgtgtgtgtgtgtgtgtttgtatgtgtttatcctcttcaatagatatcaatgatttcataaagccccatctatacctcctttgaaaaagccacagataacttgtctaagggatttgttcacaaatgatagtgacaggctggtcactttgcctattcgtggagaaacaattgttgttttcttgtctctggagacctgcagatctggttatttttgaagataaaccaggcagaaggaaggaaaacccacatgatggtaatccttcaacagccatggcagtgtgcagtttcagcacccaggctctctttacaaaaacgactgagtgtcagagcacacacctttccgagagacgttgtttgactatttcacctaagagctgtcacaaagaagccatctctgatgttgggaaatgctgttgacacccctggttctacatggatccctctccaccctgtcatctctttggcagcgtggaaataaaaatatatgtatcatttcatttccggggactctgctgttaaaatatataaatgaaagaaattgacttcaggccccaaaataaatatataacacagtaagaactgataaactaataaatatctatcaccgttatatttcatgatttcccaaagatatctgaagagcacttaattgttactgagtaatcaattattcaattaaccttcttctcattgaatatatatttgatacaactttttgaagcttcagctttaaaaggttcctatcgattgcaagtttcaaggccatatggcctgagtattggatttgtgccgtcatgattgacagtagcggctagtaatcacatgcaactatttcagatggtgtgagtttcagtgaggaggtcacaatggtgatgttcattttatagataaatatatttatgtgcatgtgtgtacatatacatacacaaaatctctgcctcatacatgctccgcagcagccttctgcatttacacatggcgcctgtttcgttttgtgcaaacattgaccaaatacaggccccactccagacgtgagcccagtgttccgaagagtaactgcatcatctcagaggccacccgatgattccgtgatcggaattttggaagtcttctatttaaacaagataagagaccagcaatgctctcaaattcaaaaattaaattgcatgaggcttggagttgcaagttgaaaaaaaatcatttcaattcaaaggaaatcttttctgctctgctttgctctggtttacttctctagactcttcttaggcaaccttgggtgtgtaagagactacattgactgactctcttaatttaatctttcttctgatgacagatttttgggtgagtgtgcagaattgaatagtggtcatgatatccttgtgtgatataagtcagcagatgcaatgcaatgttcaagaactctttgtggtgtcctgcaaaggaaaaggctggtataatggatttgtaacacatccctagaaatatgtagtcctgtgaacactgtgttattaatataaataggtgcaagcttttgggggggccaaataaaaaataagtatcaaataggtataaaatgtgtgttccctctcacccagcaattctacttattggaagtttttccaaagaaaattatctgacatgtcggggaaagactttcgcataaggatattaatcaacacatcctttataatgaggggaaacttagaaaacaactgacaagcccaagaataggggtgaagctaaattaggcacttccacatgaagaaacaccatgtagctataaaattatattgcagaggaataattaatgacagggagaaatattgaccttacctataacatttagtgaaaggctgtatttgaagcatacattgtataaaaacattagatagttatggctggaaaaaatatttggagtgaatttacattcagaatggccagtggtttttttctagatatggagatggtgggagatcattctttgttctttgtgcttttcgttattttccaaatattctatgtgtttgaataaccatcccctgacgaccttgaaattaacataacttaatagctcaaagcttaaattatttgatgcacccaactttcccaaaaatagcacgtgattgtggagtccctccgatgccatctcctgccctgtcctctcttaattctgcctcccggctcccggatggagacaatgctgagctgtgggtgctgggatgggccccccagaagacggtcataatcaagatattagcaaagactttctgtcctgaaaaatgccgtaaacagactcggtttgacctccttaatgcaggagcactttagtaatctgtgcctaatgattttttacattaagtcccagcttgtgttgggcccttgtgaggcacagtaatttaagaacagtcattttgcacattccgatctcattatgttacattgttactgaataaagactggtattatgttgctcccataaagggcagaagtggcctgaattttatctgctgaacgaatcaatctggattatgtcagttgaaaagaattgtggactgcagtctctcccgcagatggggggggatagttttttgttttttgattttttttttaatgtatctggttgttctgaatacatgaactacgataatacctggtggtgactgagtagtagtttttctctcttatttttcaatgaagagtgtaccaattatcatttcaacataacgtattaggagatcaattggaaactgaaagccatttccccatgttaatgctgtgttgtgtttaagctgccctgacggccggtcggggctgtgggaaaaggctgagcaaataatgaggaaagagcttagaaaatagacaagggtggggcttggcaggggatgtgaactattcatcaacaactcaacgaggatgatggaaataataagtcctccttaaagaaaaaagggaaaattttttctctttctctctttctttctttttctttttcgtttcttttttttttttttttttttttttaagaaatagtttcccctttggggaggaagaaaagcacatttaaccctaactttgtcctgcttctccatgagctgatttcaaacttcctgaaatcagccaatacttccctttgaaatggatagtgcaggtttaaacagtgggcattctttagcaatcagtttaagaaaacagtgtctaatttcctgtccattcctgcacatttcttagcacatggtagtgtcatttaatatctaagtacagtaatgctgtgctttaacttaagaaaatgcagacaaaccccctgagtgaaataatttgtgtgatctttgaactgaccatgaataaaatcaagcccttactatttgccctttatttatacagtggagaaaacctttgaaacccgaaactctgcaggatatggtatatgcatacagtatgtttcttaaaattatataactctgttgcattttataagtttccccaacttctccagccgccattatacgacgccttccaaatatttaccttagaaatgaatacgattttctaatattattgcattcaggagttgctaaatttccattcagcagacctaattccaccatctgtaaagttctagattttataatacttataagctgtttctaatctatttttactgccttgttctgtcctgaaatgtcaaagagtgcagaataggtcttggaattaacatgacagttaagaaacttggcaaggttttacagcagactgtgacattaacaaaatacaaaggagaatggtgaaattaacattaatgtatgcttgcagacactataaaaatctatatgtccatgatcgtggaattaaaaaataggcatgtttttaggatgatgctattaaagacagatctttactatgaaaggaaatttccatatgaaaagcaacttactaaaagtaatgccataatcccctctctggaatgaacaacaggtttaccgtcctaggtcaagtaggcatatggctgtctctggctgccaattttttttctaggcttctttaatctgtgataaaactgctttgaaagcactaatagcattttttcacagctgtgaaggagatcatatgatacatgtacctagaagggggatcatttgtttagattcacagattgaaaaaataaatcatttaagactcacttttaatttcatcatgggaagatttcaaatagtgctatctagaggaattcttgctgagttttctctctctctctctctctctctctctctctctctctctctctctctctctctctctccctctccctctctccctctctcagcagctgctagaaccagcctgtcctgtcctagttactccttggtgactgtagttgtgtaaactgtaataaccctgaccttgggctgatggacgctgatttaggaacctgcagtcctggcatttgaatcaggccaggctgctggagggcggggtggatggagcctgggactggctctgcaggctcagagcaacaggcactggtcagatcccagactgaggctccactcctgctgtctgggtgatcacaggccagttgcttaacttctctgaatctcaccggaaaatagaggaatcaaaaatacccacctacataggtgggatctgtgaaaggcatgtatgtctacaaagtccctggcacgtagtaccatttatgcgattgtttttgtttttaattggatagtggtgagaatcggggagggtggggatgggggaataaaatcctggcctttgaacacactctgctccctgtggagtcagtgtggctggcatcaaagagcgctttctgctatgaagatctctgatcccgcatgtactctggacccttcccggctgggagggctgagggctgatgtctgggctgccagcccagttctttagcccggcaacttttcacttcaccaccccagcctctgtttatcttcctataaataggtcacaatagtgcctcctagaggctccatgagagtaaagcgagttcttcaacaggaaacacttcaggcctggaaaataatatccagtaaaaaaattaaaagaaagtttaaaaatgcataagcagtggccaggcgccgtggctcatgcctgtaatcccagcactttgggagggcgaggcagatggatgacctgaggtcaggacttcgaaactggcctgagcaacatggtgaaaccctgactctactaaaactataaaattagccaggcatggtagcacatgcctgtaatcccagctactagggaggctgaagaaggagaatcgcttgaaccagggaggcagaggttgcagtaagccaggatggcaccattgcactctagcctgggcaacaagagtgaaactccatcaaaaaataattaataataatgataataataataataatccataagcagtaatgcgttgtttgaagagctgtcttgggggatgtttctatgttgctccctgcacacagcagactggggggatcagtggaggaagcttagctcagctcagttgagagatccatggccctgtgggctgaggagggcctgcctgggattgaagtttcacaggaaaatcacctttgctgcatttcctgaaagtggctcctgaagatcctggtcactcaaaggccatgtgactggcccaggagggtctggtgctgggtaaattctgtttcgaaaccatctggagatccttgcttctgccaaaaagacaccctttccatgtccattccaggctcgagggaacaagccaggtttcccttttgctggacaaagtgctcctagaaaacaggttaaggggatcagcagcagcgtggagagatttggggtttgggtatttggggggccctaggcagcaggcacagtcactaggggatcagaggactgagaggaaaggaggggtcactgtctggagacattgcacattctggtgcactgcatggacaggtgattcctggtgtgtctgggattcctgtggtggccccttttgggagactttatttgggatcctggggtccaggctggggcccctgcagccccaaagggctctgaggagggaccctcgatacatctcacctaggtacccatgaagatgggactacaccaagtttgttgctttagggttgatctagacagaaggtgcctatctgcagacatgccacagacatgcgtgtgcatgctcgcttgctgatcacggctcacctggtctcccaggaggttctgagcttaggcccagccctcccagcagcaggtgcactgcctcccagtctcccatcactcaggatgcttgagctgcttctcatctttgatgaggtggctcaggccctgctgctgggttccttctcacatcagaagctggccgggtccgacacgttccctcctgtccgctcttcttttctccctccctttccctgcctcctccctcccttccactccctcctctcttttctcccctctcctcccatcctctgctggggatcccggcaggcactggctgcactcacgtccttccaccagtagatggcggcctctgcacagaagtggaacccacatttctattactgtttaggctttgagagggggctttctgagcctcaaggtggggtgttctaggaacagctccgggctctgggggtagcagaatcctcagaagcccacacatggggtaaggcgggagctggaaacctcgcggatctagtttcccttgcctcagagctgggacccagaaataccttttaattgctttatttgttttctctgtgtgtatatatataatataaatatacacacaaaatatatatattcaaaaatatatatgtaaaatatatgtatgtgtatatatgtgtgtgtgtgtatatatatatatatatgtatgtatgtatgtatgcatattttaaaagacttattcacattgaaaatccaggatattttacagagcatatcaggcaatttctggaaaagtcagaagttgtggtaaccctgggctcatgtctcctgggccacaggggaaggtgctgagtatcgcctgacccttggggcagctgttctcaggcctaccttggtgtaagctcttgccctacccaattttcccaggaatgcaaactgtgctgtaagctgggccctcttgtctaaactaacctcgttagcatctcgcagtagcacagcaccgaggactaatgactgaacacatgctgtgtgctgtagacctcccgagcaccaggtactgtctccatctgaattcatttacacgcctgaacaggtgtaattatccccagcttacagaaggggaaactgaggctcagaggagcaatcgcctgtcccagtagcagaacaggggtgacttgcacacaggcttgcctggtggaaaagctgggttagtgcctggttggcccttgggtgcagggagggggcacctgcaccctcccacgctatcagcctctccctctgtgtgcgttagctgctttctgtgtccatccgggaggcctcccccatgccgaagctgcctgtgagtgggaaggtgggtggttaggagacctgaaatgccgaagtgtccccaatggcctggatcaaggttaattgaagggactgaccatgactgtgtataaaacaatgtcagaagactctctcagctagagttttttctagctttttttttttttttaattaatgagaagtgaggtaatctcaccttttcagattcccagagtaaatgaagacctacctgctctggaagcccagagcatgtcaggttgtcttggatatagagtacatgaacagctcccagcctatttactacagtactagataacaatagcagagcagtagtgttagtatacactcagcatgtcctgagtgcttgcaatgtgctaagaactatgctgtgaaggtcaaaccctataaggtatacattgttattagcctcatttcatcgatggggaaacgcaggctcagagaggttaagtaacttgtctaaggtcacacagctggtaattggcagggctagatttgaagccaggtcctcagggcactatcctttcaaggaattctatcgaaatggcatgtaattggctctaaaataactggagtgcccttcagaagtgctaactgctccaagttatctggattcttcttggatgttaaatgtaatattagaaaaaaaatttttagttcatgatgatggtcttggccacattttctctctctccaggaaataaatttttgcaaaattaagatatttatttgccctggagactctacaccatgtagagattccacagtgggggctcctgaccttgagtttgaggggagggggtgtgattgactttcttttgcttgctaggacaggtcctgcatccctgggccaatcaggggccccttctagaattttctgcctaatacactgctaaccctgtcccaggccaggctacagttgcttcctggtgtgtctgagtttttgtgtgggggcgccttctgggagcttaaaagctcaggatcttggcggccaatttgagggtccctgcagtcccaaaggacactgaggagggacccttgttatgcctctcccaggtacccgtgaagatggagccaccaaagtttgttaccttagagttgacccagatctgtggtgaggggaagtcggctccagcctctgcgctgcctctctctgctgatggctccctgggggctcggtgtaggtctcctctataaggcgggtcatatttgccacacccacttcgaggccatgtgaaggggccgcgtgggaggtgcccagttcttggctggtggaaaagtcgtttgttgctgtgatcacaggagctcccaactcattccaccttctctaagccagctccgattcctgaggaccacctgtgtgcccaagcctggttggggcgtttctggttaattaggaaagggatcccataccccaaatgcccagaagaaggagccagaggtttagaagggccaggccacggaggagcagctcagcgagggtggtctctgagtgggcagcgggggcaagggttgtcgggggaccccctcacacgcctgggtgcattgtgctcatggtggcccctgcccctggaactatgaatgtggcagtcctggaggcttcctagagcccagctagatcattcctggagggaaggggacagcaggagcaattgtcccaatgccacagtggggcgatgcacaggcggctggcgctccctgtctgtttttggagaggaaatgacacgacctgcagctgggtagactgcctcttgtctggtcgggtctcctccatttctgttcctcacgcgcttccctaaactgggcatctggcaggctcagccgggcagacgtgttccaaggaccactggcatttgtgatggctgagtcctgtgcctgcgggaggggcggcccccatccctcacacactccctttaggcggtgcctggccgtggtcagcttccccggggactcagcctcggtgtccagcctgatgaagaaagaagggacaggctcctggagagtaggggactgccaggccacttccgcaggcaggcggaggggtcccttggcctccctgtcctcagccccggagaatcccactctcctgctgcggggacctgaacttcgggaatcccgagatggccgcaagagggcgcccgatcctcgcagaaggacaaggctccactttccctaaaacctgaaagaagcttgcaggggggctgcgtggggtagagggcaccaactgacaaacacccaattttgctgtctctcagggtgttcggagcaagtatggaaataaaaactgttcctattgttggaaaaaattaaaggagaaaagacctcaggttaaccgctttgttcaatgacgtattcattgtggcaatgtgcacgaatagagcgtctgctgagtgctaggctggaggagttctatgaactagggcggactggattgttcctgcttctacaggagggaagagaacgaagtgggcaaaagagctgagcccagagtcacacagactcacgcctgcatctgcctctctccaaagcagcttttccctttcccctcatcctgcccaggtgggagagggcgggcccgggactcacgggcttcttagcctctggcgcagcatggcgtcttgtggctaggtgccagaagctggcggaaggaggggtacgtgggaggcttagtgcaatgggggaacgaattcctgaggctcctctctcctccccatcccgcccatccctagggcccagcctcaggcttcctctgagactcctcccctcctgcgccgcttctcattcgcttagtgcactgggatcagcatgcctgagttcgaatcccgtcttttgccctcattcgctgagtggccttggaaaactgtggcattcatttgggctgggtgttctgcctgtgaaatccgtggtcacgatgactgcacctgtgtaggacgatcctatagatcagatgagaaaatccatgccaggaaggctgtctgtgggatgcccggcccatggcaagcacctactcaacacgggctgttaatatagtccttgtcatcgttgtcttctcggccttgccaggttggacactgagctcccccgcagacgggtctcggggaatgaactgttcactacgaagtccaaagagagtttcatttggttttgttgggggaggcatttcccaggctcttcctcgtggagtctgagaacagagacagaggccttccttccccagagacgcctttccggactggccccttggtgcctctgttgcccacgcccttcaggcaggttctgaaggcaggagccattcccgggtccatcccttcagcccgggagcctggctctctgctgtatccctgccaggctgtaacagcgagagcacagagaaggtactctgtccactctatcaaatggatgaatgattgcccatttcatggccaagaacattctgctgctctatccaggctcctctccccaccccattctgcccatccctagggcccagcctcaggcttcccctgagactcctcccctccccttctctttctcattcaatcattctttcattttcccgttcactcaatgcacgcacgtgcttctgcatgtgaggctcaccacaagccctagaggaacaaggatgaatgcatcattatcctatctgccagaggatcgccatggtgcaggcccacaggtacctagggggtataactcagcatgggtgttgcccttaggcaaatcatcaatgacccatgttcaggcttgacattggggaaggggtcatgtgtccagtctgaaatctggaggaaattgttaggtgcccgtgacatagttgggggcttcccagccaaaggagtagcatgtgatgatcactggaaaggttggcccagccggggagctgaagggtctgtcctagagcaaatgcagagggtgtggaagcagtgaccagggacaggcctggagagagactgtggccaggtcacggaggccttgtcaactcagcagagatgatggcggcttcatccaagtgactctggggcttcaggggtgcagagcaggaagaactgagggagaaggagaaggggaagcggggcaggggtggaggccccaggtgctgagagggcacagcctcactggagggaggtggctcttcctcagtgaccagaggtgaggaggaggcgggcagtctgcagtgacatggggatatgtctaactagtgtttatagcacctgcgctatctcaggaagcactaggtataaatagatactcagcagacatttgttcagtgacgaacaaacagcctcaacttgggtggttgcaatttcaaaatgcattcttccgaccctgggaggctgccaagatccttgcttggcaagatccctgagaatgtccttctagtcctggtacagctggaaggatctctgggagggtctgtggccattggacttgaggcatcaagacaggcccatcatctacccaggagttcttttctcagtaggactttacggagcgtggtcaccgccctgggacccggcccactcagccaaggctatgtcactcactggggccgtccaggccttcacttgggtcacccgattcccatctcaacgtttctttttccttgctataatattttattcaaaacaagatagattacttggccagagaaactgaacccagacagacagaaaatagcttccccttttattctgcaattcagaacttcttacaaatgatctgccagttggggtgccccatcccctggaggagtctgtgtgtgcagaggggccataattgtgctgatgttatagagacttaagtgaccaccccagggctgccgttgctcaggtgtgtttctggcattcccaagttggtacccttacatgcaatattttacattagaatgcatgcgtttgaaatagcgaattggtgaacatgtaaaccagatgctaagagggctttgagagctagcctgggcacccaattacaaaaggggcattatttccacagcaaagcatatttcagggtccatacagcaaacaaggtcaaatctgaaagatggggtctgcaaacctccatcttctttgtagtgatgttttaatcccattcctctccaatcctagctcaagaatctgttagtaagagcatgggggagaatgatgagaagcctggtttaaaaaacaaacacatcaaattctctgctaccacttatgagttctgtgactttagtcctttgcttggaatcttccagaatcataccctaagataaggatttaggcacaggcagttttttgggaggagggagagaagatcccaggaagtacaaggagggagtggggggagcagatgtaggcgtgttttgaagcaggtgatccctgtgggaaatggagtcttattcctgctgggaccctccgaggaactatgtggacaacctcaagaaagctgcggtgtttataagccagcccctatcctgtcttggttgagtgtattcctggggtgttcaccctttggccctttaatccaataagagcccatgactggagaacccccttggccagaaagccccatatgctttggcatatgtggaaacagcctgcaggagatggcccaggggaatgggtgaggactccagtgcccctgtcacatgagaatcgagcctctccgagcctccgtttcctcatctgcactgtcagctgttccagcccgcctaggacccttccagggtgatctgtatgatctgtgtgacctatgagacatgaaatagtgacagatctgagcagaagccaagcacagcgcctggcccttcaggggcacacatgacatcactgttgtttcatcacttttctgcttggtcttcctctgcctagattccaatatgaattttttcagttcatcttcaaatctctgctctcctctccctgggggaaatcttcattgctccacgctggggtcctgaacccactgaaaacattctctctgtgtctgagaagctgactcagattttccttttgtagacgggtctcccgccctgtgcctgccacgggactggcacatacatcgcccgcacagcaccatggccctggccacccaggcacatcttaaataaaagcaatagtaaaagagtcaagccaaccagccacagccacccttttctcctcctgtggctgaagcctgcagtgcccctaagcctgctatctcgtcacctcttcctgcctctggggcacacatcccaacctaactctcacatgcgtgcccaccaccccaaaccgtgcacggacgcacgtcccgatgtcaggttccccatgtttataggtaaaatattactggtgaccgacacacagcctttttctcctacgttgtcattttatgttaattgaatgctagtgttaatctaatagagtttagatttatgttgggttctgtagcgagtcatattttaatcaatacacattccaacatttagatggacagatgagaaaagcagcttcatctccgcacttgggttccatcagctgtcaataattccccatttgaatccttcagatggtcagatttatgggtttgagtatattgcattcatcacagaaattaacttttggtggaactgatgtgaaagctcacatcacatctccaagaggcagatattgtgtttcagagctgaggcactcggaaatattatctgagaggagcaggttggcggggtgacagcaggagatgggataggggcctgggtggagaaggctttcagggcacagtgctccttaaggcacgtaggcatcactctgtgtcccgtaagcagagctagggctggttctgggcatcctgtgccatgcaccctgtgcccaggctgcccggggatggagagggagtggttgcatagagtcaggtgaaagaggatgctgttcctgccaggtaaaagactgaaagactcttctcttgtggaccttggctggtcctactctcaggttaatttctcaggaagcagagccagagttaagaaatcagggcatccaggtttacttgacatgtgactgatggagtattgggaagggaaggaaaccaatggagtgtatgccctcaatccaggtgggcagttggagttttggggagctctgggacctgaagagcactcctcagagtgaccccacctgagaggtgaggaagctgcctttgtctggtaaattgctgcccatcgtgggtggaggccagcttgagctctaaatatgaactcggaggcactttcagcttgtccagcttgcctctgtagctgggatgtcaataaaagcctcctgtatagtgtgttcttggttggtattcgaggtaggcagctttttgcatttagagatgggagtcaagtagacagggcaggacatgctcagagatggtccttccagccatccccctgtggtcagggagaatgacaccctgctgcttgaacaggtcacgtgggcatcgggctgggctccactgcttacctgcccgccttgtcaaaatcccttccccctgagaaactcctgcagctgaaggtggctgagaggctctgtttccacaactcccaagagacacagataacagtgcagtgctccacgaggctcagtttctctctctggcctcatgttctctggctttcattcctgtagctatctataggacagtgcttattgatcttggaatccgtttgccgcacctctaaggaactggatatgccatttaggctttgggggccattagacacttccacagagatttgtatcagaagtagcaaccactcgtctctgtttctgccatgtaaacaggcaaatggatttgcccttgagtttgctgatgcaagcgttcaaagtgcaatgagcccagagcttctacctgatggacccctcaaaggtgtccgttgctctatggccagtgagcagagacaggtgagaaaggacgctgttcctaacaggtgaaagactgaaagactcttctcctgtggacctcggctggtcctactctcagggcaacttttcaggaagcagaaccagagtttagaaatcaggtcattcaggtttatttgagatgtaacccatggcttatcacgaaaggaaggaaaccaagaaagtgtggattggagaaggagctgggaaggctcacagctgcatgccttgaaatctcatcttgagatgtctgtttctgctttatttccagaggcaaaggtaatgagtgcgcccactctgatttctctgtctcctggcgcccagaaaaaagaggagacattccttgactttccagtctagctattctttcttcagaggagacaaaaagatggctatagagatgacagccctctcagtttctctccatgaaatgagtgatcaagagtgaggtctcatggaaatgcactcttgcttttttattttttatttttgacacagggtctcactctgttgcctaggctggagtgcagttgtgtgatcatagctcactgcagcctcgacctcctaggctcaagtgatcctcccacttcagcctcttacatagcagggactataggcatgagccactacatcaggctaattttttaattttttttaatagagatggggtctctctgtgttgcccaggctggtcttgaactcccggggtcaagagatcctcccttctcccaaagtattgggattacaggtgtgagccacatgtgctgggccagaaatgcacttttgtttttaaacttcaaacactttgggaaattcattgactcttcatgtctttgcatgcagtttattctgggtgctcatgggaaatgatttccttgcctctactgtgagcaagatgaacatgaacctttgtgcataaaacctgaactgtgcccattgagagtctatggccatctgtgaatgtgtaaagaagatggctttcactctgtgagccccttgtcaacattgtaggacaggaagtcacatgcctccatcataggtctgcctcgtgatcacagcattatttgagaacatatctgtatttgcaaaaatccattataactcccttgttgttggggatgcagttaataagtgaaggtaacacaaaatatgatttcaaatcagtttaataaaattattcatgtagattttaaatcatttttacagttgatttaacatttgtgactggtttatagattatgatataggatggtgtttgcatctttgcaattttattccaatttagaaacagtacaaatattaatttttgcttcaataatggagccttagagaattaaacttgtcttttctccacacacattttatgaaaatgattttaatatgattttaaatatatcttttgaggaacttcttgcagggaagccctttgaacagggacttaaatgggagtatcttctcaaaagtttcttttgagacaagggtggacattttatttattttttatggaaatggagtcttgctatgttgcccagcctggtctcaaactcctggcctcatgtgatcctcccacctcggcctcccaaagtgctgggataatagttgtgagccgacacacccagtcaaatattgagtttttaagatattttgcttgtgaaagaaatggcgtgatgccttttctacaattgaagaaagttctgaagcttctagatgtggcttcttaacaattatgagcccaaattaatgtataccttggctcatacctgctgggctgccgcaatctccctggggccaggccagctggatctgtgctgaaaccagacacctggctggtgctcgggagaggttttggcttcacaatcccagcctctgatggttttcttggttacctcaggattacctgcttctcggtttcttattggtgttatacttaagatctcaacagccaggtgaccatgtgcaggcattggagttggccctatcaatttggcctctgaaaggtgccctcctggctattgatgcatctgcagagggcagcacagtgacaaggacagggccctggccacccttggccatccacctggggctgtggccaaggcactttccagctcagcacagtgtgccttggcgaggacattcactgctctccatgcaggatcctggccctcaggcccagagcaaaatgtcccccggggacacaggaaaagctggcggcaggctgacctcttgggtcctgtctagctctgacccctgcatgctgcagatacagataactgcactgtttttgtgaattatatgtaattgtagagactgggataaccaatgactttgatcttttgcgatttttgtctttcctggcatcaagaaaccacttaaaagcctcctaagaccctgagctcataaagcccaagtgaggggtgctgcacgtggcctgccccctctgatttggggggacttggtgatccctgaatgggagtctctgcccaggaaaggaagggctgttagagaggggatggggtgaacgggaggcaccctgatgggcacaggtagcccccagctatcaccctgagccaccgaacttccttccttgggaggagaagaggcagggtttagagacttcttctggccacggttgagaatgtcaaaagcttgagtgttcggtgacagtttatatttaaaagcaaactatttcaagaggatttgggatgagaaattagactgcaaagggtccatgaaaaagcagcatcaagaaacaatcaacaacttgcaagagaagcaagggggtgctgtcttcagggaccggagaagcctccatggtaccacagctttcctcttcaaaaggctgggccgggttatggccgctggctgggagatgctcaggatgcgggacaggttaggggcactgtgtgcagggggattgctcagggtcctcagcaggggtcggagaggctcacggcctttctggtctcccttctgagcctggatatcggtgagaggctccaggagccgagtgcagagccgatccagcccagcctgtgactctggccacaggcagagacctgcacaagctctggcttccctccctccccatcgcccactgtccttcttcaccatcttctctcaggaagcagttacctgtcccagctcagttttcccttctgctcacagcatcttgacagacatggtgggaacccaagacaagagaaggcatgatattgctcttgaaactgcagatcccaggcagatcctggcactggactcctagagccaagcagggagccttgggagaaatcagactatgtctggagcttcctttagaattcctcggagctccttggtacccacccccaagcccccccacacacacctatacccttactgtttaggcttaacttttgctttttgccctctggaaataggtcagttaaatcttcattcaaaataaagagattaaggaggctgagacagaagggtcgcttgaggtcaggaggttgagactgccttgagccaagatagttcactccagcctgggtgacagagtgagactccatcctaaaaagaaatgaataaaataaaataaaagagtagcacgttgttacatagatgacaagtccccagtgaatagctgcaggatccctgcagcccccttcaacaccgagccagccgagacatgagtagattctctcagtggcaacaggtgatttttcttctgtgcagaagacaggggtgaacgggctgcccatccttaaattctgaggccacacagctgcatggaggtcggttcaatacaggctcaggacttcccatatccaggcaccagcccgattttttatttttgaaagttaatccatctgtgcggtggattatcaatagctgctttcccttaaccaccgcttcacagctatctgggatcagagagcaattttggagcccgcagctagatgatggaggtgaggccctgggccgggaaggaagggaaaggagacgcggcagctgagtctttcttggctgcagcagaaacaaggtggctgggggtggcgctcaggaaaccctagggtgtgaggctttagctgctggtgccaggagtaaagcccaccgggctgcctgccagggcctgagggtgcagggctctgtgcagctgtcccctcccctccacgaactgccccctccccacgacttctgggaaacgtcacctctttacatccaggaggcagagcccttggtgtggggcagcagggaagggccagatcctactgtggctgcaggacaacccagcaggaaggtcaaaggcaggtgcgtgtcggctcccggcagtctgcagacttgcttggctgggtcccccagagcctctgagggtctggaattggtagttaacatttaaaactcaagggatttcacataaaaacctgtttctggcttctctggaaaattgagagaaattgcaattctcaacctgttttgcggggagaggggggtcagctctgggcatccagcccacctggcccacatcgggaactggagttacttgccagatgcacaggtgaacgagtttcctgccacctggtcatccatgctgtctttacccagggcctctgtctccactgtacgccctgggaaaaacccaggccaggggagggagggaggggtaagggacactggacaaggttggggtgtgtgctgtgcccaaagaggggtcaggctgagtgggaaaaagactcctgggtctggaggccggagatgacaatcctgcctcctctctgtcacaccggggacaagaaatggggaggcaggggccccatgcacagaccctgctgttccttatctgttctgcaactgtcgtttatgattattatttttattttattttattttattttattattattatactttaagttttagggtacatgtgcacaatgtgcaggttagttacatatgtatatatgtgccatgttggtgtgctgcacccattaactcgtcatttagcattaggtatatctcctaaagctatccctcccccctccccccaccccacaacagtccccagaatgtgatgttccccttcctgtgtccatgtgttctcattgttcaattcccacctatgagtgagaatatgcggtgtttggttttttgttcttgcgatagcttactgagaatgatgatttccaatttcatccatgtccctacaaaggacatgaactcatcattttctgtggctgcatagtattccatgatgtatatgtgccacattttcttaatccagtctatcattgttggacatttgggttggttccaagtctttgttattgtgaatagtgccgcaataaacatacatgtgtatgtgtctttatagcagcatgatttatagtcctttgggtatatacccagtaatgggatggctgggtcaaatggtatttctagttctagatccctgaggaatcgccacactgacttccacaatggctgaactagtttacagtcccaccaacagtgtaaaagtgttcctatttctccacatcctctccagcacctgttgtttcctgactttttaatgatcaccattctaactggtgtgagatggtatctcattgtggttttgatctgcatttctctgatggccagtgatggtgagcattttttcatgtcgttatggaacatctgcctgccaggtgtaccctgcaccccgcccctttctattccccaactttcactacagcccctttccgactttccgaaccccaggggcaaccacacttgatctgggatgaatggctctgtatcctccatggatatggaaagtctgttttaaggaatgagacccgtggagtgggcaggagggtcactgcttagtttgccctgcagcacaggaacccacaagggtcctgactcctggggctttctgcagacctgagcgccaggcctgtgcaaggtgctgaggaggtgtgctaagtttgagtcaacaggcagctgtgcactcctgctggagccagtgtgggagatgttgtggactgaggggcatcacagggggcttcctggaggaggaagcctgtgagctggcggggagtggggtaggaaataggggcgtgcccagcagaaagtgcagcttaagagctctccgcatgaagcgcaggaagtctttccctggtgtccctggcctgctttagctggggcaccagccaagaagctggatggagtcctaagggcccctcctcctagcacttagggcagctctctgcccagcagatactggtggcgttgatcctttctctcctattgtcataatttggattctaggaagccacgctgcagactggtttaccaggcgggaggctggtgccgagcagcctcatttgatgggtcctaattacttaggagcagaagtggctccagtcctccaggtccagttccaccctctggtctctgggtagccccccttccccaatgacatctccgccacgctggagagaacagcccctctggaatccgcaatggtgtcagcccagccaacgtgggctccaacagacgttaattgtgtccctggaggaggcttccctgaagttggggtcactccactgtgtcttccgtaagcgatttgtgcataatcgacagtgcaaatgggaaggaaaaaagggagggcagtcccagcttagcagggtagggggacaagagaaagaggcctgtattgcctttatggcccaggaaggagaacaacgagggaggggcttgcggaccaccaggggccaaaaagctgcatcttcaaatctccaaaccaaggagctcactgggttctgacccagccaggcaaggggatgaaatcttaatggtatctctcgaactctgcaagttttgggtttgcatacagcctgtcctcagtaacccccaagatgaagctgctgcgtgctgaggactcgaggcgaggatgtgtttccccaagaaaggaggaatctataagagacatgatgagatgtaccgttcgaattggtttctctcccagaatatacatttgtgctggtcgcgcgtgcacacagcatacagtgtaattcacacacacgcacacaaatgcacgaccagccgcatcgagattcttggtagaggaccagctctcggatcaagctggcagaaggaggcaattcagatacgacacccctttctttggaagggtgccttccccacctccatccccagggaaaatctgccaaatgggcataatattaagtaacgttggcagggggcagctcacggtccctcctgacgctgcttcctggatctgcagagatggtgtcgttgctttcctgccctccctctctgcctcccctcagcccggaggggaaatgagggatgaagaacggggtggtggcaccctctctcccccaacaccctccatccaggcagcacctctggccccggaggtgccctctccccgggagtggaaagaatcacccgtctctttttggcaccagcaccctcctgaatgccatgagaagctggtgaccttcactctggtctccatgacgacaagatggtatatgtttaattagttcaggcttattttaggaccaattttcttttattttagggcaatgcgagctatgataactgtaagcatgtttacgaggcgcgcgaggcttagctgaaatgtgccaacaattctagtcaaacagatggtgacccctgattcaacttgccctctcattcaattattcagctgtatttaattttcctccgagtgactcacgcgccgtgcctccggctgccctctaggtggcgcgaaagaccacctttatggctgcgaggcagggttgaaagccgggtctcggggaattttctcagcctggccttggctggagaagaggataatgaatttctgcatttgaacaatagtttctgcctaatatcaaatgatgtgaaagggtggaaaagaattgggtcaaattgtatgtgatttgaccatgagctctaagtaatctcctttctaataaaggaatttgaaagaccttccaggcttaatatcctcccaaataatttgtttggagttcaaggagtgttatggtgttagagctgtttctatgattgcggatatgttctgtttgcatttggaaaacctcttctgtttaatttttagtagctgccagcccacctcatctgggactaggaggataacctgagcggattttttttttttctctttttccctctgatggtttctgcctgccttctacgctgtcaaggcttagcagtatttgaaaactggatgtccctgtaaaggggaatgaaattgctcactaaatatcttttcaaagacatgacctttctaatgcaggaaccaaagaagcgtgtggccacacccataataacaacacattggatttctcagaacctttgggaaaggaaacagcctactcaactatcacccactccacttcatcccattctgtaacaccttagacaggaggggctgtaccttagacatgctcaactcacatttcttgtccatcaacatagctaggttaatcagagcaacatggaatcatacctttattcatcaatcagttaagaattcatgcctttagtattgctttttttgatacattaagacaagcttgtaaccgatcactcatatatttttctccaagaatatctctctttagaaatcttcttggaaaattatctatctttcctgtcctgcatttggtcaaaccacaagtaaaagaaccaagatcaacaatgactcacatgtacacacacacacacatatatacatatatatatttgagatggggtctcactctgtcacccaggctcgagtgcaatggtacaatctcggcttactgcaacccctgcctcctgggctcaagtgatcctcccacctcagcctcctgagtaactgggacgacagatgcatgccacaatgcctggctaatttttttgtgtttctggtggagatggggtttcactatgttgcccaggctggcctccaactcctgagctcaagtgatccgcccgccttggcctcccaaagtgctgggattacaggtttgagccaccgcgtcttggcctcacaaaaatcttaatgcataaactgcttctaaagacaacacgtcaactttccatggattcacggtccaggttttggtaaggaagttcactttacctgaaaactcttagttctcatttttgcttaagggcaaaatcatggcaatagaaaggttaaaaccatgtgcaccgatttgattcctggaactccatttttacaggcttggctttggtttgctttcctgctttatcttatccaccgatggcttggttcggtcattctgtgttagaggttctgcatgtaaaccagggaatctttggttcaggcaagggagggggctgttgcttcacagcatgactttataggggctgattgacgcagggggcgggacatgggcagcggtcgggacctgatcccgggctgaacagccaagggcccttaccaagcctccgagggcagatgcagttgcaccctatttatgtctgggacactcaaacttagcctactggggccacttatgttttcagtgcgtcttccagggggttatgtgggagggggttgtctcaattacagctactcaggccacgcaagtgaattgtacttaatacctctgccctctgattagcctaccagattggactcaacagcttcctcagatgatcagagcccccttatccttttggataactttgtgttggtggggggaggggtctttatcaaatcctttggaagaattgggtaaaacaccaaaggggtttgggtgtgtcccatctgagcccttggggtctctggattttctgctctgagggtgcgactgcacccctgtctcccatgcttcatcttccacagggatgcaatgacagtgagtagggggctttagaacaagtcctcgaggtagccccatctgagctgatggagagactctttctggatatctgtgggctcttacagcgggagtgtttttatttgtaggtgtggggtgtgtgtgtgtgcacagacacattcatagaaacaagccttcttgatgctttgcagggaaaccaaactctggtatccccatccagcttggctccttgcaaacagggcccatggaacccagggaggtagagacggaagggatggattgggaggaaaaagtcagggcagcttcaccagggaacacactctgtagccaagtcacgattttaaaaaaataaatgccataaaaatcatggcttctctggacctctggcttcaatatgggatttgtacatattacataatctgtcactatagtactgtatattaaagaaatggccccgtgcagaggcaaccagggggatgggggcaccgtcccagccgctgccgccgtcctcccctccatcatgggctgggacgctgtcagctccaccacctgccccacggtcctgccacgttgctgagatcccaagttactctgcctcctggaacgtcatttgtttttctttgttcggaagacaggctacatgagcatttgcgtgaggccatctgtatctctgcaaagaaataatggagcaaggtagaaaatgtctgggtggggaagaccccagtctgtggcaatggctgaagatggggcaggggccagagaaactttctccagggtgtgatgtctgaatccctgtgcccaggaaagggcctgcacaacttctttgccccttccctctctcacgttctcagcttctgcatttactccccacagctcctttccctccttgcagtcctcatttgcagagttctgtgaagatcattttgggagtgtgagctgtctctagccagctcattctgcagtagcagcgagcaccccccaactcccaggaatcaacccccaacacacacacacacttttttttttcttttgcaaagggccaactctgtttttttcctgaaggtggcagtgaaagaaaaaaaatgactcccttagaagagttaggaattttattacaaaccagatggagccgcgggcatccccgttgtgtgtcccccaccctgtgagtgtgtatgtgtgtgtgcacacccaggggcactgacaatggaagctgcagcccccccaagtggggctcacacagggcgcggtggcctcccctggcaccgtggcaccgtggcccagtggcccagtgccaagtggctgccgtgctcagccagcctgctcttcgtcctccctcttagtcccttaccaagataattgaggatataatggcggggaaggagcccgccggctcccgcgggctgtcaggtatctgcgcgcgtcttcatgtcatccgtcagcattgagctcctctgtcatctctcctcagccttcagcgtcgcacactctcatcgccttcattatctcggctcaggccagccctccccccactccccccatccagtaaatgcatctttgtgcaactctcagtctccgattatgaatcgatgatcatgtggtataagagagatagatggcttttagttccatcctgtctcccctaattgtaaaatattagttacattacactgtgtcttttgattaatggaacttatttggagtagcctatccgatccctcccccttctaaagtcctccactgacttttgagaattgagtgatttcacttaaagcagacaaataggcccttcagcgaggagatagcaagactgtgatactgtgggcaagacaggctgtacagacagagttgtgtattccaaagaaaggcttcagcccggccgggcagacgcggggctgcaaatgcatgcctgggccggggaacttccttcccttctttatttcatcctctttttggcaaatctagcccatcttgctgacttgcaaaacaggatgtgaaacaaaatttaattaaaattaaataaattgcagatttgctacattcccacatgtggctcatgagaaaccagtcaaatctgaactttgatgaattcgagctctcactctactgggctcccttcttagtgtacaggacggggcatcaaaggggcgttctgctgcccacgtccgacacagggagagatatttatctttaaagctgaatttattttacttggcactatttacttaaatatggtccgttgataaagtaagcccttcccatacaaaagggaagtcggtggctaaatctcttattataaataatcactatcagtgtaaactcaaggtcacgttcactttcaacctatgagctcaattaaaaaaggtctatttactgtcgatgtgtataatatctatatgtcagggaaacagggagacttcataaacaaatcaaattttcagcaaagaaaggcattgcagcttaggaatttcagcatgcattttgagggagcactttcaggcctcctgctgtataaaatacacacaaatatttatgtctattttatagaatatgcctagtatttcattctgacctttggatttttttaaaaaaaacttttatttgcatgattcttgaacacactgactattacgtattttctggggacatgctatttcacttaatgcactgggcaaaagattgattttattacgtgtagagaagctgcaaatgttttactttattttttaaaaaagagcataacaatgtgtttatgactgctaaaaaaaaaaaaaaaagggcaggcagcaaaacaaaccaagcctgagtttcaaattcattctgaggattaaacacccagaaaacacggagattagagattggagggctgagccccaccggttcagtccacctcccatctcctgcccagggctgtgcagggggcctcacaagtgtctggagaatcaacatccacatttgttctggattaataactcaggtgcccggatctctccttcccagcacctgagcctcgattttggaatttctgtatttcgttttcatgtgtgttttgagtccttgctttgaggagagtgtgtgcgtgaggactctttgttctgagtgtcaagggacttttgtaaatgtcagctgagtttcggctgctgtgtctaataaacctccttagggcttaagatgcactttctccaaattttcatcagcagcatcactcacttagttatctacatccatcatattttgagagtcttttatagaatattcttaatacagcgtgtgaatgcatattgacaattgttggcacttttatatattccgcgatacacatttatctgttatggatccataatatcaaatgtgtagtaaaaagctatatcaaaaggcagttatcccacatgcataaaacactctcacatggttgctttaattttcttactacagcttttgaaacccccacttaatactgatggactcccatatttcatttaagtgtgtgcctgagaggagctgagttgcttctaaggcgagtgggtagctctggctcttactgggggaaactctgtgttggggctaagctcagagcatgggagcctacacatcaccctggctggccctcctggtagcgctctgggctggagatgtttcacctcctggggactggctgcagagagggtggtctgagcctccagggacctggcctcccctgaataacagcagccaatatttatggccatagcctttgacaatattggcccgctctgctccacattctgtgctgagctctcgatgtgtgtcatccccttagacctggccatccattcggagagaggcactagcctgagcccctttcacagatgagaaaactgaggctttggaaggaaagagggacttgttccaggctacgcagctgttaagagctgaaggtagagagctgtctgcctccaaagctgagaacaaaatgttctccttccttcttgaacctgtctgcctgcatctggaattatttggagctttacgctaacctaacactggatattatcctgttgttttgaagattcaatgagacattgatttgtgtacaatacctgatcacagtaagagctcaaatgccaaaaacatgtccgtctgtgagggcagaggggatgtataggcagcataccctgtccaaacaggaacattttctttcaggaaatgctcattgctgctttcctttttcagttttctaaatcattttgggaggggagagagtttagaaaactcgtttatttgggtaagatttctgatgggttgtggctattcctgggacaatgtgattgtcaggaaatgttatcaaaatgaggagattccctctcaaaggtacatggccctggccttgggaagagacatggatgcacttgtcatgtttggagtgaccagcagggaccaggaccatctgggggcaaatgccttcctgagacagcgttcccgtgtgtcccgtggaacagggagggcaaaagctcctagtgaattataaagtctgctgcatgtgtgagagaagacaatggtggcattaatggtgaaaataaagagaagaataaaaaaacaggtacacaggcttgttcctgaaggctgcaagaaacagaattagattttgttgctagataccagaaagtgaaaatttcagcgtggcttttcatttggcatcatggattttaacaaaataaaataaacatctggttgtttgaatgccagtgaggcaccctctttcccaccaccctgccccctgattcagccaaactgtgtgtgtaaacactgtcttaattgacttcaggttagggaagtctggaaaacaagcttaaattcataaaactggaatggacatccttgaggcctctccaatcatcaaacagtaggtatttatttatcaaccacttactgggcgcacggctttgttaggtatcaatggggaacaaatgccggtaatattggtccaccatcctagaggaggccacatttggggtgaaaagactcttctagcaaaacaaaggtccagtgaagaactaagtcctgttgtagagaaaggggagaaatggggccttctgaggatgggaggggatgccagagaggaagcgatttgaaagggatttgaatccggataattatgctggcgatgagtttggtaaggaagcctcatttagttcacattcaggtcgagtctctctctttctctctgtataaagatgtgtctattttgagactcaggaaagaaatgattctatttgcaaagtagatatttgtttgttgtttattaatcatcacgaacagctttccactggattcactggcactaaatggctgcccttcaaatcttatccttaaagcaggatcttggggttctctggtggttcagagaggaggggtttggagccagaccacttggtttcatacccagctgccccatttcctgcgtcacccaggcacatgactgtctttgcacctcagttttcccgtctgtaaaatggaaggatcgtagtaattgggacttaccttacaatttgtgtaaggactgaatggcacataatcagctgtcccattcttaaaaccaaagtgaggaggatctgataaaaaccactcctcccctgcaaacaacatgatttttgttttccttttggcaatgcttggttttttttctctttcattttagcaaatcattgtagaaggaattttgcagcttgactgaagataccggctaactattgtgagtagtttatagcctggtggtcagtgaggctgctgcttacggtctgagctaggaaaggcagaagaacatgtttctagaggagttaagggctggaggtggggagggagatttgtttgcacagaccagaggcctcccaacaaaatctccaagatctttcaaaagcaaatcagaccgctgaccagctggctgagccggcagagttgagcaggatctttctgtattaaccgtgaggtctgctcaggagaccacctccgctggcccaccccccacatgcacatgaaaaaaggaggcagactttgcatcagggcggtcgtctccagagatctgcggccaggggacaagcccgtccccgctcggatcccaggccagatggaacaggaagatccggatactaaaaatcaacttgtcaccgagacattcctcaactgttaatcaaattggggctgagggtgagggggtgggaataccaaaaggacatcaaagggggtctcacgcccagactccgctccgtttcaaggctctgtaatttgggaaggttgtatgctaaataatttgcgaggctcccaacatgcaggttattgtttgtggacagatggtgcattgcgttttatcgcttttccttctgtgggccctcatatgtgggactgatgtgtattgtgaagtctttgtctccttgctaaaatctctaatctaaaacaggcaatcaagcacagaggcagggcttcagaaggcatcatcagagttttaaaagcaaagaaaaaaaaatggggaggggggaaaccagacatccaactgcagttacgaggcagatgtgtttgcagagaacgtgagaggttattagggtattaaaagtggacaaatgaaagggattcggaagcacagagggagagaaagggccacgctgtggcagtggtgggcacccgggtggtgatgcctagcatcacccctgcctgcagcctctgcccgggcctccacctcccctccagagaccgggggtctttgtctctgcaggcggtcatggccgggcctgggaggccccctctcggatcccaggctgcccttaagagttaaatcatgtggatatacaggaaggaaatgaaatagacgaacttgctcctcttttcttcctacggatttttctttttgattctgaagatagaattactgtttgtaagcatctgaaagtcattagaaaccctgcagtctgtcaggtgccgacgcaagaaactgctgaaaccaaacgggtgcctgcaccgagggctgggaattcatcatgtgctgatgagcagttataataatatatgagcaaatcacaagcattctgcaaattaatcaaatttttttccccttctcccttgtctctgggagagtggctttgcaggcagacgtaggtgaagcagttttactcacagatggtcgctctggcatcagatggaatttatataacagtaattctgattctttgccaaagaggcagcgaacacaccagggagattgtagaaggcaagtcatgtggttttgctgaggttgttgtgggaagtttaaggggggaaatctcaaattttcctctttgcctttactgtttttgcctgaagggccagaaacggaacgccgttctgccatgggcgaaatccgtcacgtcttttctcgcgacttgtgctgaaagagtgcttcgcagctgttgcaactgctggcggtgacagagccccaagactccggctcctggctggctccttacaagatttaaaggggagagggttcagaaggtggccacgctgcacactaggaagaggcagagctgcctcctcgcacgcccacagcgcttacttacccttctgctccctgtggcattgctaaacctataagggcttttcttttgaagtgttttattaaatgaagagtctaacaaccctcactttaattacacacgggctccgtttataattcctctggatttattcaagtagttgaaaacgatggtgcctggtgattaagctgatcatcttagtttagcagctccaaaacctgggggggagagagagagagagagagagagagagtgtgtgtatacgtgtgcagcgtggaggtgctactagtgtgtgcttgcacatggtcgcttgtccctatgcctctccgtgcttcggacaccccccactcattttaaacttctctctcccttgagaaacctcatctcgcatgggacaaagggatacatgagctgaccctcttgggtccacactggatcacaccacaaggtgcccttatccctgctgaaggaaggatgataccaagatggcgtgtagactgcattatgcaatacagtcctgatgctgtgaggtttttttccccctccccctgatgtaaagccctgcccatttgttttggtttacgtgactacagagaaataagtggattagatggaaactttcacatgcttcattgcagctgggtgcggacatctgtcattcctcagccatattctggattatgccagcaagaggatatgcaaagtctgacacctttgattttagagagagccttttatagtggggggagagaagagaagaaaggaggctcatttcctttgtgacttcataaaaaaaaaagaaagacacctctcttctgtgttttattttatttatttatgtctgccacgtgacattagtggcgctccaggatgagggctgagcattgaaaagtttatgcttccatctttcctttttactttgtaattttctattgttcacagtaccaatttgttgaattgggcatgataaaaagtagctattttaaatatatccagtgtgcccatctatatggatatatactgtgggtatggattgcgggtgtctgattcctttatgggaagagagatgtgcgattctttctcacacataaactcacattaatacaatacaacctcactgaattttgatggaatgtgactgctcccgcgacactgtttttggtgagctgctctgcaacccatatggcccccccaacccactgtaggaaatgcactaatgtttttatgaaagatgtgtgcaggtagtgaattatccacagataaccttggatgccagctttcagtggattggatatcgatacacttaaggtgcttcatgctggtggtttcataggttggcccctccccttgtggctttcctggtgccatacagagcacagcacacccttggcacaagccaagttccaatattggcccccctcccacatttaagttgtacaataaaacagaaactacaattaagggctgatgtgttcattttaagcgacacaatggaaaacaggaagtgattgaaccagcagggaccacccacttgtttatttcactgggtgtgtacaagaatgcagttcatctgctgggtgaaaaaacacacaaagcctcacccagtctccctgccccaacctcaaagaaagtgcaatactggctgtttagttgagagtggtacaaagtggagattggaaagtccagggcccacaggcgcctggctggtgatgcctgggaagtaaatgggtgccaggcagcgggaataagtgggacccagctccccagcggctgcctccaggaagatcttgccagacctcctgactttgcaagagaaactggaaatccatgttttaatgtgaaatatttttttaaatgtaacattggcaatgaattacatttttttttaaagaaatagtgttgggggaaaaaaatatgtgggcctgcagcttgtaaccactaggagggtgaatgcatttatgtctacagcagtgatggaatctatggtgcagccacttggcccccatgggggaggcctgtgggcttttggagctcacagtcagggtgggccgtgccatcccagtcccccacagaaagtggtaaggtggagggcaagagtgaggagggcagggcgtggttcttggagatgtgattgggattctgagcttcaatgcaggaaagaggaaaatgcagagctacccagtatgtcaaggtgcacctgagaagccgttcaacactctccaccaacgtggagaatgggaggaagagcgtagtattaatagctgagattggggttactaaagggaccccctggaacacagagcactcagattttcctgctgaggaaaacagcaaggcatggtggggcattccaggtatgaggcacagaccaggtagggacagtgtgcaggggagggtgctccagggtcacctgttaggaggtgtggcctgcacggaggaaggaagccaagtgccaggctctgagcagggtgtgcatagcaaggtggggactcctgtgggctgaacccccagaaagaggtccttcagtaaacaacgtctggttccttatccagtccctactgtgtgcagagcccgccagagggcagcagtttccagcctcctagagccattagcgaacagtgcctgacagaacataattaagtgcctaattgtgtggtgccacagataagtggagctctgcagactgggtcctgagaaccgcttctaggaggagttggggctttggcgggtctcaatggaagaagatgtgggggctggagatgggtgaatttctggtaggaacgacagtgtatagtaggtaagaagggattgcaatttggaaagccaggttaaggaggtgagatactgcagtgagaaatagggagccatggatggctatagaggaggggtgggcacatgtatagccaggatttggggacttgacttggtatggatggtgtggctttcttctgcctggagaggtctcactgttggtctgaggtggactattgacccagtggacttgatggtacccagaagagggtttacagggacagggctggctgtcaccatctctgctaaattccgtgcatccttacagcccatcttattgccaacagggatttcagataactgtgtttagcccaatgttcctaaggagggaagcgagggatattaaatgtgtatcataggtgctgcgtctgctaattttagactccttatttttgccatctctgagtgtcaccctaataatttcacttaatatttaaaaattaattggttaaaaacttaaaaatacacaactctagctttgttttaggaataatatccaactctgattcactagtttttgggatttttgctaaagctgttaacctgaaaagtggtcagcttggttccatttaaaattacctttgaagccggtttaataagcacctctcccccagcccccgcaatgttggagagagaagggaatttctggaggagtgaggtgggccaccagcccctccgctcccggctcccccactccagcacttccaggccagcgccttctctttggtttctcccggcatttctttaaagactaaatgcactcacccagagacaaactctgggtatcattagagtattattatattacacatcgaaaaatcttcaaaaacggaatgtaagttcattgaccctttgaaggttatttaatgataaacataaatgctttcataaaatccgggcaatgatttaaggtccccgatcaatagttgctgttgagtgcacactggcagggcaggccggcttgcctgaccacccaggcgggctgatggctccactcatcagaggagcctgggtaagcaaataaacaggatataaggcaaaatctgtagggcatgcgcaatggcgggggatgaagttgctggggaagggagccacctagaggccaggccccaggaagagtagccctgaagccaacacctggtggggctgagctgggaggcatgggagactctgcaccaccagccagaggctcctctctgctgatgccctgctgaaatctggcgacatctaagctcttatcctaactcaacttgggcctcaagctgcagggagacagcaagacacagtgcaggttgagctccagctgcaggaccatgttctgcctctctctggctttgtggctctggacagatgctgtgctagtccattctcacactgctacaaagatatgatcagagacagggtaatttataaacaaaagaggtctaattgactcatagttctgcatggctgaggaggcctcaggaaacttacagtcatggcgtaaggtaaaggggaagccaggcatgggggcaggtgagagagagagcaagtgggaactgccaaacacttttaaaaccatcagcactcatgagaactccctcactatcaagagaacagcatgggggaaatggtccccatgatccaatcacctcccaccaggtccctgcctcaacacctagggatcgcaattcaagttgagatttggatggggacacagagccaaaccatatcatccaacaaatgggagcccaacccctgatttcagcattggcagaggaatcaaaatgcacatctcccatttgaagttcaaggttaccatgcaatgggcacgtagtaggtggagtattttaatacttacagccttttctagcagacattcatttaactctatgtgctgcactttgtgcttaagcatcaggcctcatctcattgaatcctcacagcaatcctattagggagctattattattattgcacccattttaccgatgagaaaactgagacttagaaaggttaactagctggttcaagagcacacacaaccgataagaggcagatacgttagagccttggtgtctggcttgaaaatctacagtcttcatcactgtgcttgaataatgaaaaatgctgcatgctagcagggcagtggcgatttctcaaaatctgctctgctgccttccctgatccttgggttgcaggcccagcagactgtgtgtgtgccatatgccctccagaagttttcgtgtcaacagaagttaagtattacctgtttggttctgtgactttggaagcatctcttgatgtggggtgttggtttcttcctgttcacagaaaatcaatcaaatccacttttaaataaactttcaaaataaacttttaattttagtatggatttagatttataaaaatgtttcatagacgtgggatgtggtgcttcacgcctgtaatcccagcactgtgggaggccatggcaggcggatcacctgaggtcaactgttcaagaccagcctggccaacatggtgaaacccagtctctactaaaaatacaaaaattagctggacccattggtgcacgcctgtagtcccagctacgcaggatgctgagtctggagaatcacttgaacctgggaggtggacgctgcagtgaactgagactgcgccactgtactccagcctgggtgacagagcaagactcagtctcaaaaaaaaaaaaaaagtttgcatagataatacagagaactctcatagatttcaccgccatttcccactattattaacatcttacattggtagggtatgtttgtcacaattcacgaagcaatattgacacattatttttaaataaagtccatcttgtattcttagtgttttagtttttatccgatgtcctgttctgctccaggataccatattaccttaggtgtcctgtctccttccaccttcctggctgcaacagtttctcacttttcttgtttctgatgaccttgacagtttccaggagtattttgcagaacgtccctcagttgcaatttctcatgtgtagactggggttatggatttagggaaggaagaccacaaaggtaaattaccattctcatcatatcaagtcaagggcacctgctgtcagcctgaccttggtctgctggctgaggtcatgtttgtctggtttctccacggaagttactctcccgtccctttccatactgtactctttggaaggaagtcacttggcacagtccactcttaaggagtagggagatatgctccgtctccttgagcaagaaatagctacaaaattatttggaatgcacaaggcatttgtcaatccttccccctgtatttattgatgcaatcatttatgccagtatgatttgtggatatttattttagactctgggtcataatctgatattatgttgtttactttgttactcaaatggttctacctttgggtatgggggcttcttcagcaagctctgtgctaatctgacacccccactccaccatcaatatgtgggggtttttttttagtactttcttactttctagcactaaataccccgggattattttggtgtatttcctatcccagtcctagaatcagccatttctccaaggagccctggttccctttttttgggagtggtattagaaaccaatgtcaccacttctagaccctctcagctgacagaataaggaaatatatgcttgtgtactaactcctgtatatacacacatctatattataaatatgaagttaagcttgagttcacacagatgtcttcaatccattaccacacagatcaaaatgcacttgtaaaataagtacatttttttttgggtagccttctaaattaaaacccaaatcacaggaaatttgaaacctaaatttatttgtactaaggatattccaaagtgttttagcatctttgatgagatggatgaatatttttttaaaactgaaaacataaattacgtacctgattggaatcattctcgcctatttggaattaggaaatttttttaaactatatgtgcaactgagaaaacggctctctctgtgggcctagtgattctttatgtatatttttacctctctcattgccctgctgagccactgagcctcttgaagctgaaggcaggattgccagggtcctgggctggcatcctcccattttgcagcctcagggtcaaagtggtaaatattcaaaggaagcagcaggtgatggtgaggggcttcaaggtccccaagtgaagaccagccaagcaccctgcaggcctgacccactcatgaacctgttgtaccaccatacccagtggattccccccaggccggcggggcccactctggggagctgaatttctttttcctcctttcctttctctcttctttctctttctctcttttttctctttctttctttcttactttctttctttattcctttctttctttctctccctccctccgcctccctccttctctctccctctttctttctctttccttcctttcttcctccctccctccctgtctctttctttcccttccttcccttctttccttctttcttttctttccttctttcttttctttccttctttctttccttctttctttccttctttctttctttctttctttctttctctctctctctctctttctttctttctctttgtgtctttctttctctccctccctccttccctctccctctttctttctctatccctccttcctccctccctcccccctccttccttccttccttcctcctttcttactttccttccttcctttcttccttctctttttcagagtcttgctctgttgcccaggctgcagtgcactggcactccaaccactcactgcaatctccaactcttgggctcaagtgaccctcctgcctcaggctcccaagtagctgggatcacagatgtgtgccaccatacctggctcattttaaaatttttgtagggatgagggcttattatattgtccaggctggtcttgaattcttggcctccagcaatcctcctgccttggcctcctaaagctgtggaatttcaggcctgagcctcccgtggccctgaatttttaatgtatcctattgacctataagaggtcaatgtatcaaatgtatccaatggtcaaatgtatccaattgacctatagggggatacctttttaatgtatccaactgacctatagtgatgaagacctatagtttcttacctagctgcaggcattgcctaaatgttcctaatttcaaggagttcaggcggcgctggttgtgcagctctgggagaagtgtgttatagggagcccctctgggtgctagtgggcagtggctgttctcaagccttacagccctgtgtgtgggaactgatgcggaggctgcttctctccacttgatcacctgctcccttctaggcaatggcactgtcaaacgtggatgcaggacgcccttctgcagtagagatattttgtgatcccatgctctgaaaatgatgttcctcgtgctcaatgcccagctttgatgggcttctgttcctgtaaggggagtgacatctggtgcatgtgctatatctcactctcacacacacacacacacacacacacacgcaaacacacacagacacacacaaacacaaacacacacacaaacacacagacacagacgcatacaaacacaaacacacatacacaaacacacacagacacacacaaacacaaacacaccaacacacacacagacacacacaaacacaaatacacaaacacaaacacacagacacacccaaacacacacagacacaaaaacacacaaacacacacacagacacaaacacacagaaacacaaacacacaaacacacacagacacacacaaacacacacacagacacaaaaactcacaaacacacagacacacaaacacacagacacacaaacacacacacaaacacacacacatacacatggtacacaccccttcagggggttcatggaccacctcttggagcatctttgactcctaaccagaggcccctctttgtagagactcttccagcaagcaggttgcagtccatggcaggagcaggtggagagacgagcattcttttagagaagacatgaagttgaattcctgatcagtaagcagtaagttccatacgtgtgactttggatgatcatttaatctccctggatcggggatttcatgtctgtaaggtgggaagacatccctctgccatatctccctactgacagtcatgaggaccaactgaggccactcatgctgatgcactttgatgagtgggtgccagaacatgttcaccaatgggcactgtcaccactccaggactaaacaccacagggtggtcacctcttctctccccactctcttaccctctgtcccacacttgaggagaagccatcagtttggaaagtctggaagccccatagacgcagccccctctcttccacaaagccagctgcccacaagtgtggtgctgtaatgaatggatggccctcccaagggcaggcattttctactcccccttaggtgcggcgaaagagcagatatttccatcctagcaagtaagaaaaatatctcgtttccccactttcgttataaacaatgtacgacttgctttctccttactcctcttgaccctccgcactgtatacatatttatatattattcatagtggattaaaaatgaatgtgctctttaccacggctctacggcgcagcgacaatacaaattaacgtatgatgtacttacttttcgcatggcagtgatgggaaatgttgatggcctcaaagtgagaggtagagagaggggaatgaggtggggcgggcagttgggggggcccccatctggccacaccaccagggctctgagccctggataaagatagatggggattgggaacattctgggaactggtgtggcggcagtgctggaaaagtcttcccaattctcttctcccacggaacgagggccaagtttcccggtggatcctgtgtgcctggcccctgttcaccctccccactgagcttcccctgtacctcgctgacctgctcctaggatgctgcactgacccaggcttcctgcttctgtgcctgggctcaggtgtgcccctcagactgcagtagcactgtctctctttcctatctcctggcaacctgtttcattcatctgttcctttgctggaaaaaaatgcttggcggaaatctgtgatgtgccaagcaccgtgctgggtggtgagtaacaacaatcatcaaaaaacccaaacaaccccaaaataaaagctcagtccttgcccccgtggagctgacagtctgcctggtggggaagacagccgtgattgttttatttgttcagcttctgctagcagccagactgaggaagaggcgtgtgctgggatgtgtgtcacagccatggtggcaggcctggggtcatccgggaggccttccccaggcagaggcagctgcatggaggcctggaggatgagtttgcaggagttggatgaagtaggggcaggcagagtccagatcgaggagacgatcagggaggatcgagcaaaggtcccggggcagaaaagagcatgatgcatttggagaacagagagaagtctcctgtggccagagtgcagcaaactatgcaggctttaagggagatgaggaggggggatgctcagaggctcagattcctcctggcaggtgttacgggagctccccatcacttgtacaatatcacagcccgcactgcctcccagtgctgtttgggacctggcccccagccaacttagccctaccttctaaatggggagttccttctggcaagaggcctcacccacatcaaattctatctcacatttgctgaactttctcccagtgaaatgcacctgttaacaacttgttcctttgggctttgaaggtcctccggtttcccagatcccccattcaaatgcctatgccccaaagagagacagtcccttaagctttcatggtgctacctgcggcaggaagcacaggacagtggcacaggaagcacttgctaagtcagtactttcgatgaagaaccaggcagagcttcccctgagtcagcttagatcaacagcaggatgacagcagcagccgtgccaatcaccagcagccgacatcttggagttcttcgtcatttaccaatgtgtcacatgccatcatctgatgctcacagcactcctgtgatatagtgtcagtattattgcatcattatcaaggtgtggaaatggaagccttgagttctagtggttgcccaaggtcagagagagagaagattgaagttcagggtgctagtagcttagcagccttacaaaagagggaagcagtggtaggaacccaagctcctcagtccactggggagaaggagtgccctgaaagtaaagcaaaggtgccagaacaagagagctctgggtcttcctatttgaccaaaggccatcctggagtgtggtgcttcttagcaagttcaacttgggagaggctatcgccttgatgctctctccaatggggagctggcaggagtgggtgttattctcttcagttccgccacaatggaagcctgcttgacccaagtctgtcttaatacttattctgcatcttcaacattgatggacattagcatcttccttacacctctaggaatccccaaatctaggtccagtcaactaagatggcacaggcaacatggctggtcttttgtttcattaaaaagagatagatgggctgggcacagtggttcacgccagtaatcccagcactttgggaggctgaggtgggcggatcacctgaggtcaggagttcgagactaacctgaccaacctggtgaaaccccacctctattaaaaatacaaaaattacccgggcatggtagcaggcacctgtaatcccagctacttgggaggctgaggcaggagaatggcttaaacccgggaggcagaggttgcagtgagctgagatcgtgccattgcactccagcctgggcaacaagagtgagagtccatctcaaaaaaaaaaaaaaaaaaaaaaagagatagatggaagtgagcaggccactgaggggctgccttgtcacctctgggactgcagcggcttctcctctggggatgagatgacctacctccatctagagagatctgacttcttccaaacccacagccccctcagcaggaatgtctcgcggtgttgttccatgggcccctcttgctgctgctgccttcaggagggtctctgctgtcagaaatatgtgaaatccacagggacgtattcagcagagctcagcactttttttttttttttctggagcacttgcttatgttctctgacccaaagccaacagatcccagtcttattatcatcaggggctttcacagggacaaatggtagagagacatttggaactttttatccagatttacttggactcagaaatgtgtcatgtccaacagtactgtgcatagcaacagctttctgtttgggaataaatgttctcatcatcaaaagatcaggctttcagttatatttgattcttgggaaaatataatggcttattccgggcctatcatagcttctcccagtcaacttccccaagggtgggcctttcacttcttcatagaactttcttccacatcagtctcatgggagcctttcagcaaacaactcagaaagatgtgtgtgtgtgtgtgtgtgtgtgtgtctataaacaatattatggatatagaataaaacgcattgtaaattgtgtataaactaacacattatgtgtgtgtgtatgtgtgtttgagcctataaaaacacattttaatcacagtctttgtaataagtttagagaatgagggtgactaagtactttatatccattggaaatttgttttaaagccaaaccttctagattcactgtatctcagctctctcatctgtacaatggagctgatatcatcccttggcaaaattgtccaaagctcaaatatgaggataaacatgcaaaaatgtatgtgaaaaactgtggaatgaaggtcttcagggtctttaggtactatcagtattatctacaaagcttctacttactagatacactgcaagatcaggatttattatgattctagcattgtatagacttctttctacaaatggatatgtgcatagctttagatggatttacatatagatttccatctcacctaagtgaaaatgaaaccaattcaatactaatgttttgaccagtgaagtatccaaatctgccagaattattattatacatttggctattaccaagaaacagagattcaaaatataaccataggataaaatcatgattaatattttaaaatcgattggtggaaaaaaggtactaagtgcttttataccaagttggccaaatcaaaaaggctttcattgcaaataaaggtgatatctgaggtccacattttagtttgccaagaggcacgttgcatcactcctgtggcagtatcatttgtagggagggtggcttccatgtagcataggattcatacgtgaaattattactcagtaatgtgacaatcgaaagtacaatagacagttggctgggcgcggtggctcacgcctgtaatcccagcactttgggatgctgaggcgggtggatcacgaggtcaggagattgagaccatcctggctaacacggtgaaaccccgtctctactaaaaaaaatacaaaaagttagccggtcgtggtggcgggtgcgtgtagtcccagctactcaggaggctgaggcaggagaaaggtgtgaacccgggaggcagagcttgtagtgagccgagatcacaccactgcactgcagcctgtgcaatgagtgaaactctgtctcaaaaaaaaaaaaaaagaaagaaaatacaatagacagttttgctgatgaacaaaaacaactgaagaatggaagaactagtgtcatcctggtaaaccgaggcagatttataaacaatagtgaggtttggtcgctttgtttcatagtgctgctggcctatttggatcatggtaccaagggttttggttttattttttatttttacttactatttggagttctttactcgaaagacttgtcatacgatagtgacattctccatcaataaattattgccatataatgaataaatgaatgacttagccctagctttatctgagccatggtaattaggacagtggccagcctttgtccatgaactgctacagagctgcccttggtagaaacatagaaaatacagtccatttcagagaagctttggccaaagcctcgaaacatttctcaggtttcccggtgtcttgctccttctttatgttgtttgggatgaccttcaattggcttgtaggcctccagctacaaattgggcccgcctttttcttgcttaatagtgtccatttcagagtagctcgaactctctctcagtgagtcctgggcatagcttcgggcccacagggatgataacttaaaaaattggatggctgaatcttgggggctctgtgttgtctctaagatgcttggccaggacgatctacttggaactcactcatgcccagcttagtcctgacttagattcaccattaaggtacggagaatgggtgtggctttgcccatcccattgcctctgattggcatcctaattccatccttcagtctatgccctaactcccaggtcatgaagaacagggaccatttgcatttttttgtataatcgaaaatttgcattggaaatatgtcccagttgtccttcgcctcccaacccagggccttccctaggtgaccaagcccttaaggtgaaaagggtggcaagacagcaaatgggcagtcaccctggggactccttctcttacctggcaatcatggcactggcccctcgtgctagctgtgctcttcctcctgtggttggctgtcaggaagggccaacagcaagtgcactgttcttgtactttattttgttcttaactccgaagtctgtagatttgcacattgtcttcttgaagtgggaaggttgatgaaatttagccttgtcttagggacaacagtagaaacagaagaagcagaagcactatccaaaaatgtgtaattcctggcagggcatggtggctcacgtctgtaatcccagcactttgggaggccaaagtgggtggatcacctgaggtcaggagtttgagaccagcctggccaacatggagaaaccccatctctactaaaaatacaaaaattagctgggcatggtggcttatgcctgtaattccagctactcggggagtctaaggcgggagaatcacttgaacccaggaggcagaggttgcagtaagctgagatcatgccactgcattgcagcctgggtaacagagtgagactccatcaaaaaaaaaaaaaaaagaaaatccaaaaatgtataattccttagaaaaaggcaaggtgatacaagaatataattaataattcctgactacctgctttgtgccaggcactgggcttggcattcataacactgagatggtcatggttcttgccccaggaattcacggcctttttgggaggaccagtacatacactcaggcccacaaagcaggcatcctgctgatcaaagcctgaatagagaagtgggtttgagcctgcagagaatgaagtggcatttcagagagagggtagacaagcaagggtatggagacactgcacagtgacgtctatgtgcagagaccatctgaggtttggtttggtgtgggcaaaaggggttgtgctgtagcgtggaatggaagggtgttttaggattgagccatgaaagtcctgattattcctttggaggccagtggccatgaaagatctggggcaaataaatcacaggctgagcttctgctttaggcactcgctctgttgtccctggggaggacaggctggcggtgggaaactggaagcatgaaggccacccgcgggctgccatgttcatagtctagacaataattggtacacactggacctggttctgaagtcagcattgcaaaggaaaagattcaacaggtagaatggattagtcctggacaccagttggttatgagggaacaaagaggcagtgaactccagaagcccaacaagaagcaagaatttagcactgggtgcaattcagtgggaaagtgagcttctgcttccaacgttgcattggattcctgtttctcaggaacaagactgttttgctaaatagacgcaggactgctattactgctttagaaaaagtgctgaatatgtgtttgcttgttctctggagccagtgatggggctctccatttatttacttgtttatttttttgagcaaatgaaacccagctctgggccctgacctctctgagtgctgggtgaaacagcacatgagagcttccaggaacggctcatcaacagcttcccggaagcaggggagatgccattgcttcagaataacttccccagccagatgttttaccagttcctcgagatggtagagtctgtgcatggctgtgacgcatcagggtagagatgttgcgcttggaggattaggtgaacgtccacaggaatccacctcctgttccaaattacagtctttctaggaaggtttcatttcaagagtcactattcaaaatctaccttctttaaaactcatgctggccttgattacctgttcatctttctcctggtcccgacaactttcgctgctgcccctgagaccctcagactctagaaatccccccagctcagcccttccaactctgcctaagagcaagactcaggtgacacccctcactcaccccacccccaaacacacgctcccttgccattcttggtttgctcaacaataaagagtcaacgggaggatcagaacatgagctggctttgccctgaggcctgagtcagactcccagatggaaggatttatggtctttgtgcagaattggggtcagcaaagtgtagctcgtggacaaaatctaactattgcctggttttttgtttgtttgtttgttctttgtgtttgtgaaagggtcttgcttgttgtccaggctgtagtgcactggtaccatcatagctcactgcagcctcaaacacctggctcaagtgatcctcctgcctaagcctcctgagtagctgggaccacaggcatgtccctggctaatttttaaattttttttgtacagacagtctcaccatgttgcccaggctgatctcaaactcctgggctcaaacgactgacttgcctcagcctcccaaagtgttgggattccaggcgtgagccactgtgtccagcaattgtttgtttttatacagcctgtgagctaggaatggtttttccatttttttaatgtttaggaaaaaaactcaaatgagaataatagtagttcatcccacatgaaatttatataaaatttaaatttcagtgtccataaataaagttttgaatttcatcaataaaaagttgaggaatatttgtttcctgtcttgttctctaaatacctacacagtatcttggattttgcctctttgcctgcaaatctgggactatttattatttaaccctttatagaaaaaaattcagatatggggagacttatcttcaattacctagaaagtctgggttcaaaactctagctagagcctggtgtggtggcttgcacctgtaatctcagctacttaagaggttgaaaagagagggtcccttgaggcaggagctcgagaccagcctaggcaacatagcgagatcctgtctctaaaacaaacaaacaaaattgctgggcattgtggtgtacctgtagtcccagctactctggaggctaaggcgggaggatggcttgagcccaggagtttgaggctgcagtgagatataatcgcaccactgcactcccagcctgagatgaggaacgggacttgatctctaaaaacaacaacaaaaatattcagggatgggaagatcttctaaatcttagcttatgtgcctgatgtatcggctgcttttctcactctcactatttgatttttgcaaagtaataataatattgatcatactggtgattgcaattatgatcctttgagccctgggggccaggaaggtgtgagcaacagtgctgaccggccactctttctgcccacaggtcacaggcctttccagtgccgctactgtccctacagtgcctctcagaaggggaacctgaagacccatgtcctctgcgtccatcgcatgccttttgacaacagccagtatcccgaccgcaggttcaagcgctccagggtcgactcagaggcttctgggaatttcgaggagcctacagctgtcaaggcggggagctctgcagacctcacggaagagggcggcaagggccaggaggagaccaactgagcagaccaacctgtatattgcaatagtattttacacagttttaacattatgcatctggtaaaagtttgctaactgcattccaaggggaaaaaatcatgtacaaccccccaatagtgtatagaacatttaaaaaattttaaaagatatctatatatatattaaaaaaaaaaaattccccagcccttgaaaatggctgctaaactgttacccggcaacaagtacttccaaaacaatgcaggtgggagaaaagtgatttcaaaaattcttggtgccctctgagctggagagagctgggggcccttccaactcgaaagtcgtctttgtccaaaaataatgctcttaactgaaaaacgataccatctaaacgatttagtgttgcgttgaagatggaggggctgtgttttcgttgttgaaaacacctctataatctgacaccagctgctgtaattcgcctagaaccctaatgagatgtgtcgggaggcagctgcggtgccagtcagactggagcggtcactgcagagaaaatcaattcacgtggtgttgtaactgcactcttggagaaaccttagacggcccgcagccagcgccggggctgaccggcactgcagaggattgagatcttaaatgcgcatttttacaaaatacacagccaaatgaaatcaatgatcaggaagtgtctgcagacaaatgtccattgcaggtttgatgagtaattcctttttttagatcaaattgttctcggtagccttttcttcttttttaaaaaaaaattttggatgaagaaggaagttgctattaaaaaaaagtagggtacattatataaaatgttgttagaaaaactagctaaccccatccatagaagatgctggtgagcaattaaaatttaggtaataatagaaagatttttttactatgatttttaaaattttacttgaatgaaggctgctccggtccttattatcggattttttttcatgtgttggtttttataagtgtcacagacatgaagcaagattttcttctccagcaagctcttatgaaatagcttgtattaaaatatgatctaaacatcgtgctctctatctctaatgacgaaaactgtttgagttaaaaatgtctgtttttgtaaaacaaatgtgttctatatttttgtagattttagattttctactgattggatactccaaatttatcaagttctgcaccacacagaaggagattttgagtgtcaataatgaaacacttaactcattaaaaaaatgatttaagaagactagttaaaggtttattcttgaatctgctagcatggtgtaaagttgagccttttaacatacttcctttgagtgacatgaaattggtgctgttgcttgtggtggtagagaagtatgaaagtattaacttcttctaaaacaaaatcattcagacttaaaaaaaaaaaaaaggtcaatatttccttgcaggctgggagcacagattaaaccccagggccttaaaaacttcagctctgcctacagcagtttacaaaaatactaaactgcaatcaatgtaaataaaattcttagtgctatcctgagaccagaaagaatctcaggctaataaggaatccggtttgcatatgctgtcaaaagggtgtcatctaaccgaggtttcagtgtaaatgaggtcgctgtgcaacttggacccatctggcatagagcaagctgctttcttgtttttctagtatagttctcactgccttacttaaatcgagttgataaacttaatgcaactgtttctatgatcctagagaaaggactgaaatgttattgaaaactttccgactgtagtaagctttaggattttgactgcactactgtgtttggtgactgtgccagtcccttgctttctgtgtttgctctgcctttggtatcttagcaaagaaaaataaaaaaagaaaaaaaaaacataaaaaaaaaagaaaaaagaaaaaaaagaggaaaaaaaagtgggggaaaaaatgagagccacattccatttctagcactttgggagctctttcagtatttttttgtgtcttttcagcatcctcagatgcgacaggcaataattctgtttgtgacactgggaacatcccctcttctttgtggtgtgtgttgattccattttgtccagtgctgctgtccttcctccccctctgacacaggccttctttccagaacatttgtaacttgtaatacaaacaagtgacagccacagtgatgcagcgtcagtttctgaatgtcatcaggttctcatatctaaacatgtcaagttttttccctgtaacttctgtagtctgtgatgctggtcataatactgtctacattcctacgcaaagaaaaaaaaatctatcttggaggaaatctgagatcaataggagtagaggattttgttgctatgcttgtaacaagtagaaaactttgtatttaaagtttattcttggtcattatttattattataatacatcagttgacagaactttattctggtatagaaagtattaaaagttgttttttcagcaatgactgttttctttctgctgttagaataaaatgtctttgaagcagcccagttttatccagtgttttacgcaataaaacctctacctctgggaaaaaaaatcacatcttttcctactcgcttatgtttactaggaggagtaaaacatatttttgcaggtttgtcagactttggcaagacgttgtcaaactccatgtataaaaagccctgtactgggcagggcgtggtggctcacacctgtaattccagccctttgggaggtggatcatctaaggtcaggagttcaagaccagcctggccaatatggcaaaaccccatctctactaaaaagacacaaaattggcatgggtcaagcctgtaatcccagcactttgggaggctgaggcgggcggatcacctgaggtcaggagctcgagaccagcctggccaacatggtaaaaccctgtctctactaaaaataacaaaaattacctgggcatggtggtgcgtgcctgcagtcctagctacttgggaggctgaggcaggaggatcgctcaaacccgggaggaggaggttgcagttagccgagatggtgccattgcactccagcctgggcgacagagggagactctgcctcgcacaaaacaaaacagaacaaaaaggccggtagggtcctgcagtactaatggtcctctcaggcctgtgctttttcaagctgagtcaacctctatgccgcatacatagtgtgtgagtggggatgtgtgtgtgtgtgtgtgtgtgtgtgtgcacatgcatatgtgaactatgcttctttaaatgtttgcagacatgtggttcagtaaggtaaagtctatggaaatactaatgctcttcatattacagtaattatataaggcacttagagcattgggatctattattttcctttactggtagaaagtcttttttttttaagtcattaaatgcaagggagtcttttacgtccatattattggaggataatcggaattcttcctctagaagaaaaggaaaagagcaaaggatgacaaagtgtctggtagcaggggctactgtgaacgcagagctccgacacggagttgagagggtttgaagtgcgtgctcaacccaggatgtgaagagcttctttttgatttgttttgttgttttattttggtctcaaaacaagctaggatagtgcatattctatatccagatagttctggaatatggagggcccactgaaatgtcacaagcaaagacagctgccaaattgtatagaaatttgtctgtttaccatgtttctttcagggtgtgagactgtgtccttgggtgggagcagatgacttaaacggaatcatcgtcagttctaaccgtctgctgttatgaatatcaaaggtgagttaaggggttgtagtgaggaggtcaggaagtaaacccatgagggagagaagactggaatgcagaaggttgagttagggattctaacatctacccacaccacgtccatgatgcagctcaaacccaccagagccacacaagacaccagagtggcgagaggagagttggaacaatcagggcttaagtgggttgcacagcacgccactctgatgggagggggtgccgtgagatctcagtaactgcacatcattgccaagaggaaggtgacattaaattttctgagttttcaaggtgtactggacacctggattttgtattaagtcttccagtttttccctgttggctcaaaatttatttttaaaaaccacgtatgaatgaatgaacagaatgtgttaccaccaaagaatggaatattattctgccatagaaaagaacctgagatgtggtacaacatggatgaacctagaaaacagtgagagaagccaattacaaaaggttgcatatgatagaattccatttacatgaaatgtctagaatagtcaaatccacagagacaaaagtggattagtgcttaccagggatgagggggaggagagaatgaacagtgacagctaatgagtatgaggtttctttttgaggtggtaaaagtgtcctaaaattagatagttatggtggctgtccttggtgtcacttggtgtatatgctaaaaaacactaaatcgtgcactttaaaagagtgaattttatagtatgtgaattatatctcaattaagctcttacaaaaaataaaactgtgagtaggaggcatttttaagaggtaacaatatatatttccatcaatacattgctgagttctcatacagccatagataattgacagattagtatagtacaaataatataaaatttggggtgtaatggcttaaatttgaaccctagctttattacttactggatgcatgatggtcttgaacaattttttttttgagacagtgtctcactctgtcacccaggctggagtgctgtcgcaccatcacagccctctgaagccttgaactctaaggcttaaccaatcctttcgcctcagcctcctgagtagctgggaccacgggtgcatgccaccatgcccagttagtttttaaatttttatcgagatgaggtcttgctatgttgcccactctggtcttgaaatcctgtgctcaaaggatcctcctgcctctgcctcccaaagtgctgggattataggcgtaagccaatcttgagcaatttaactcttctcagctcattgatagtatctgtaaaattatgacaattaagtgctgtacatagggaaatcatatgcacatttcgtgaagtactctacaaatgctaggtattgtgatcattgtggcataatgaattatggatgaatttaagattaatgtcacatgcacaaaaagctagaccttgataaaatccccatgctttgtaaaggtcccctcatggtcaggtggctgggattccccacgtccatccccttcagaaaagatgaccctagacaaagatcttcaactgctgttttctaatttcctcatttgaaaaatctgagtattaacaactctcttgtcactcacaggggtagtagcaaggtggctggtgaaaagggatggatgcaatgggaaaaagattagtctcagtggtagatgttattccactcacttgtttaacacatatttacagaagacctactgtgttctaggcattgggtcacgggccagagagagatatattggtaagttagggatcatgtccagagatcactgtcttaaggggaaaacagattttgatttcataatcacacaaataaatataaactgtctggaagaggagattcaaggagaacagtaattccccatgcgatggaagctgatgatttgctgagggatgcaggagggagggccaggcagtggaagcagtgcaaagccaatgttcagtgcagacaggactctcaagtcctgtcttggcctctcaggagctgtgtggccctgctagatcgttccatttccctaaatcggctgctcctctataaagtggaacatcgcagtgccaacagcaaagactctttctgaggttaaatgagatagtacatgtaacagctatggagagaacaagctagacactgccatattcaaaggacagttctcaaaagtgacagtgtctggaaacccatgaggacacggaaatggcgatgcctgctgcagaccatggctttctcatcctcatcgccaagggccaacatagtgtgagccacatgacttctgcagcacgttacctctcacatcccgatgcctcatgcccttaggaaggagtgggtgaaagtgtcctggggccaattcagggtctctatggctctgtccatgggcgtggccaccctgaagcagcatagtttgctggaagtgtttctagagggtgatcaaccatcctggtttccctgggactgaggggtttcccaggacatagtaattttagtgctaaaaccagggtagtcctggacaaacacaaatattccccctaggtctaagctggcttcctttaaaagcacgtgtcttgttttggccaagccgaggttatggctgtccctgagctgggaggccagtgtgaggcccggtgtgaaggggaagccatggctccagggggcccatagtatgggctttggcactgggagacttggattcaaagctttcctgccacagcatctttaccacaaagatgaaagtgacacagtacccaaaatacttagcgtggcacctggcacgtgggcattattttatccattctcattgagtgactgaatgaatctttgttcctccttcttacccaggtgggaaatggctcaaatatgaatttcttttcctagcagctagaagcttctgagctgccgatatctggcattaagatgctcttttgtgctgaaacttttataaagacgataaccctgctgtctcctgtagtttgggatttgcgcacttccccctctctgtttaacatctgtattgtaacagtatattacgaaaacctcacctggtgtattgtaagcacaatcccaaggaaattagtattaaatattgtgatcttcatttcaagatagaagggctgggcacgttccaccaaactggaggtatgtttccatagggaaggagaaaaattcatggtgtaatacaatattaaaaatgtcacccagctgagcattccatgtagaagcttgtgtagagttttaatctcttcacctgttggtgctaagagaaaagagagagttggggtgggggagggagaccgggagggagaggaagggcttatgagaacagggaaatcacaagcaaagaggagggggaaaatttaaatgatcccagaccaaactgttttgctgttaatacagaaatacagtgcaagacacatttaatgggctctattttttattatactatgctgaataattaactttgaggctaagtgtcacatggatttatcttttaattaaaaaagcatggttcacgcatatttgagtggtagtccaaataaatgcaatatagaaatttatgtttgtttatctaggtgttaattacctagagattgtcctggattacttctttttataaagtgtcataggctcgtgtcagaacgaataaagcttggccgtggaaccttatcaatttgctaactatagtgccggtctgacctgagcagggagggcaggggaaaactttggggcttgttatgtatacacacgcccgcattcaacccacagcaaataaaatagtcgttttagaaaatattcctaggacataaaggcacaaatatatcttcattgttttacagcctcttgtccacagctatttataaaacatgtgattatttatgcgttgggttatgagaagttcgctgggagaggctgtgaaggaggctctatcaatccagttacctggtgccctggagaggtggagggagggcttcccagtggaaactgggctgggacaggaagttggctactgtgatttgtctaacatgtgtcaacctcccggctgctcccagaaaagccagacagagggatgacaaagttgagggttagaggtcacattaaaaaaaaaaaatcatgaatgcacactgagaaagtgaaaccagaagcccctaaaaattgttcatcataccttgaggcagcccctgcctttttctttgtttacaaagtgattttggggtggcagtttcagttaaatggtttggaagaaaccgagggttttggccaaaaggttctactttaaagaaatagattttgtaagggcaagaagaattccagacagagctgggagtgtctaagttgggtgcccgcttttgttggggaagtttgtttcccttgggttttctgccttgcttgtcttctttttcctacgcaccacacctccatttttggcaatcagataccagaaaatcaatacaagtaactgcgggtccctgtgggctgcacccggctggatggactgttctcctggggttcaggaaagcctaggggagacaggcactggtattcaactgtgctcgcttctctccagctggagccgaggggagccatcgagacccctaaacagcaaactctcctaccgtggaagctctctgctgggtagggtttcattttcattttgtgtttccttcctcttggagcccgtgcgggctggtggggcggctcactgtcagctccgtgatcccgcgcttggccgcgcgcctggagaggtgcgcccgggccaggagcagagcagggcgcggcgccaggcgggggcgcccggggcctgcgtgtcgtcgcgggtgggggcgggtgtcctcgggcgcgcacccgctgcggcctccggctctggaccagcccggtggctccaagggatcaaagcgaaaaacagctttggccgcaaagggagaacgccctgagccagctcgtccctaaggactcgtcttttggcgaggaaggggacgcctaggcccgtatggggcgcgctgtggcctgggccaccgccgagggcgcgtgggtcctgcgcggcgcctgctgttcactgcattactcggacaaggatcagagcctctttatcttttaaattattaacacttaactgttttcctccccaaatcgctgcccatttcctccccaggatcactgcctttatcagaaattgggcccggcagcactggggcgtgaggtggaggcaccgctgggaggagctgggcaatcttttgtgcttgagtcatgccagatactgtgctgggtgctggggacgcggcgaggacaggagaggagggtccctgtgtcctcttgtgccccctgcccagtcacagcagaattcaacaaatgaggcgattccagagcagacagagctttagaaagtgggggtcaattaatgctcaaagaaggcccttagtgctgagctctgagaagcacttgctggctgccagcagatgccccgaagccttgttccaaaagagagacctgaaccaagaggggagtgggaggtctgggctttagaggtggtcaagcaagggaccccacagggctttggaaaagaggctattgggctggaaatgacacagaagagtccacatggccatgtgatattggaatatcagggtttttttttttaattaattaagctgaaattcacataacataaaattaactattttaaagtatacaattcagtggcatttagtacattttaagttcctattttcattaccccaaaagaaaaccccaggccaggtgcggtggctgacgcctgtaattccagcactttgggaggccgagtcaggtggatcacttgaggtcaggagttcaaaaccagcctgaccaacatggtgaaaccccgtcttttttaaaaatataaaaaacttagctgggcgttgtggtgggcacctctaatcccagatactcaagagtctgaggcaggagaatcgcttgaaccctggaggcagaggttgcagagatcacatcactgcactccagcctgggtgacagagtgagactccgtctcagaaaaatatttgaaaagaaaggaaaaccccaaacctgttcagcagttattccccattccccacttctccccagcccctggcagccaccacccagctttctgtctgtacagatttactgattctggatattttatatatgtggcatcctacattatgtgaccttctgtgtctggcttctttcactcagcatcatgtttttgtggtccagccacttggtagcatgtatcagaatggcattccttttctgttttgttttgttttttgaaacagggccatgttctctcacccaggctggagggcagtggtacatcttggctcactgcaacctccacctcctgggctcaagtcatccttccacttcagcatcctgagtaactgggactacaggtgcgtgccactacactcggctaattctttttgtttttttgtagttttttagagaaggggcttcaccatgttgcccaggctggtctcgaactcctgggctcaagcaatccacctgcttcggcctcccaaagtgctgggattacaggcatgagccactgtgcctggcctgtcattctttttatggcctgcatcagaggccctacgtgctctggccttgccaatctctccaaccacctttttctcttcccctctaggtacccaatttctttcttctttatggtagtaatcactacctggaaataccttgcttacccctttctttaactgctcatggtctaccttccttatgagaatgtaagctccctgagagcagggccctcagctgggggttgtttgtaacaaccgtgttacaaacagtgtctattaacagcacgtaggacctcaaataaatagatattgaataaataaaaattcccagcacaattttctttgataataatcactagatttttatgggaatgttgttagcttaaaaaaaaaatgggccaggcacggtggctctcctgtaatcccagcacttcaggaggctgagacgggcagattgcctgagctcaggagttcacgaccagcctgggcaatatggtgaaaccccatctctcctaaaatacaaaaagttagccgggcatggcggcgttcacctgtagtcccagctactcaggaggctgaggcaggagaatagcttgaacccgggaggcagaggtagcagtgagccgatattgcgccactgcactccaacctgggcaacagacagagactctgtttaaaaaaaaaaaaaaaaaaaaaagagctccttctgcagtcttcagaaaagtgacccccaacaaagagtaatattgactagactccacagcagaccggcagtgttttggagaacttaggcgtggtcccgtttgcctttagtatgggctgtgtctgcatgtggagggaaggcctggcaaagcaagactgacggcccccttcgcgccaggattgtctaagaccagctccctacagagggacttgtggctgcaaatgggaaacttggatccagtccaaatctactctacgaggcacatccctccttctctctgcacttcagtttcctcatctataagagaagctgtgagcatctgcagcacaggcttactgcgggcagcaagtaagaccatggaaaagtgctttccaattggaaatgcccccacacaatcgttaatgtttaaaaaaccttgtgcaccctgcccatgcccagttgtgggcagggataacagagccagcggcttggccagggtctgctgcagccaccccaggtccctctcccaacccattgaccctggccaccctccagcctgcgagcctggggtcaatgcctcctcttaatgccttgccatttcttagtttgctgactggggtgattttcggtgaggtccacataaatacttcaaaaataattcatgatgaagaggaacgcttctggaatggatgatggcacgacaaattaaacgctttgtagggccaagcgtaaattattttaatgcatgtaatagatccgcccagggagacttgagcccctctcggtcatgcctctgtgcccccagggcctggagggtggtgggagcaggtggctgggagcctgttctgctggggtgtgaatcatttccttctccaaagacctattcccccagcacttaggtcctcctaacctgaggagagaatgggaatgtgtcgatgtctggccaggcggaggcaggaaccaggagacagatgaggcagtgtaagagcatttgttagccatgacgacggcctgacccacaccctgccttccattcattgtctgcccctctggagggggagtgaggaatgctgctgtgtggcaccagacatttaaaatattttgtttcccttgaaaatgtttggcagcaagactaatgtcccagttgaggccatcaacaagccatgttttacatttggacttattttatgggagtgcgggaaggaaagagaggcgattatgtccgacaaacccattccacagaagagaatgctgagagcccagaaaagctcaagatgttgagtttccagacatagaaaataaacacacttgttatatcaaaaaggctatctatgtaatattcaccaaatgatatctaaagattgttgtggtggttccataaatactgaagtaggcttgtaatcccagaggaaagaattcattgattccagaatgtgctcccgtgacccccatggtcaggcagagcatgggaatagtgcttgtggttgttgatcagttatcgcatatctggagagaagctttcgttcactcaacatttaatgaccatgcgctagttccggggtcgtgtgcagggcattggaggtacaacaggagcaatgcatgggccctgctctcaggaaactcatgactgcttgatgacctcaggaaagactcaagtcagaaatgctgcagtaactttggccaggcaccgtggctcatacctgtaatcccagcattttgggaggccgagttgggcagatcacctgaggtcaggagttcgagaccaggctggccaacagggcgaaactccatctctacaaaaatacaaaaattagcagggtgtggtggcacatgcctgtaatgctagctgctcgggaggtgggggcatgagaatgagaatcacttgaatccagaaggcagaggttgtagtgagctgagatggcaccactgcactccagcctgggtgacagagtgagactctgtctcaaaaagaaagaaataaaaagaaagaaagaaaaagaaagaaagaaagaaagaaagaaagaaagaaagaaagagagagaaaagaaagaaagaaagaaagaaagaaagaaagaaagagctacagtaacgcatgcaatgcgaagccctgaattctgggatgagtctccttccacagattgctccttaatgtcctgtccatctgcatctgaaatcccactctcatgatcccatcacatgcatcaatgttggtgagattgcgcataagagtagtgggaatggaacatttaaaaagagcaaccccttgcaaggaaagtattatgggtgaggtaatgggccctgcatgaagaataggatttggatgtgagggggtgagagagagagagtacctgagaaggttccagaaggaagagtaaatgtgctccggaccagagatccaaaggtccctggtggcttctgcatccagcaagcaggccaggaagcctggaacctgaagcccagaatgcggggatgtgtggacagaatgtctgtgttccctgacctcaagttcatacactgtcctcacccgcaatgtgatggtaagaggcagggcctctgggggcgagtgggtcatgaaggtggacccctcatgcatgggattggtgcccttataaaacagaccccagacagctatctcacccttttttcctaccaagtgaagacaaattgagaagacagccacttgtgaaggaggaggtagaccctcaccaagactgaccgggctggcaccctgatctgacttccagcctccagaagggtaagaaatacatttctgttatttataagcccccaggctatggtactctgtgacagccgtccaaaaggacgaagccagaggttgagggataaagttcctataggcagctatgcacagggtggtcccactgtgtttcctaaatattttttattgtcatgcaggtcagggtgggactgacagattctatcactgaaagaagctagagtgacttgtggtgaactaaatcatgctctacccaaaaggactttcaaatgaaaattaacattgcaacccacagaaagaaggaagcttctgagacagttgatgattactgtctgttcctggtataaaattagcatcatctcctcagtaagccttctgtacccatccctggtcaataattattttcctctttgtaagcccaaagcacctctctctgggtaagagtgtggaactccctgtagcatgtcagggctggttgtgtttttctactcctcgactggagtgggtcatttgaaggcagcagccttggctcatttctggatccatggtgacccatgatgggagcttcttgtatgctttatgttccatgttgacaaataaatcagtgcaaaggtagagtgatgtccacagaaccagtttcaaacccagccttcctgaattttagtttaacaggactacaatttcccctatgaagttcctggaaagaaaccactcaatccactaaaaatatagttggctcctggagggcatgcttattcaaagccaacatgggcatccccatggcctcaacacagcgcctggcacctgtgcattcaatcaatgtctgcaaaatgaccacgatcgggccatagtggatgctctcaatgccctgatccacgttcctgagctcactctgaacccatctgtggcttcaccggacagttcctagccactgacagcttttctcacatgaagaaccatgggagcttcctcagctccttgcaaggaagcctggtcatgctggagattaatgcacccagggcaacattcgggcaatgggagacagcatcagcgtgtacacaccccgagactggcatttgctctgctttctcagagggcgtttgcaggacggagctccagttgtccatggtggtgacctgcccataaatgcactcaggatcaatgtccccccttccctatctcatgtccccactctctcatttctgtttcctgggattatctcttaaatgaacaatctgcacccatgtccttgtcttaccaagtgcctgctttttgtgggaacccaaactaagataggagctaaagaaatatatgaataaatgttggatgaatgaatgaatgagtgaaattatgaagagagaagaagagtctgaaagcaaaccatgcacattccaccatctccattgggctgaggccggttccaggaacagggactgacagagaaggaggctgtggctccttcccaaggtggagtccgagtcagggagggccaagtctcaatgggattgttcctggcagggccacaggagtcagggggaagcatggaaggcctctctgtccagatgcggcagtcagggctggctgcctcctcccagaacatcctccttgtggccggtatccatgcacgatcctacctggagcctaagggaacttcagcaatgaatgaaggaggcatcacccagagggcagcagtaccctctgggatggagtaagaccatggcaggctgtgttctgagccgagttctataaaaataacataaaggcccagataaccggggtgggagtggggaacatggaggagctagagctgaaagaggaaaggactgggcaccccttccagatggctccttccccgctccccacccatcctgctatgaggacagggatgaatcgaatacctgaaggcggaaacagaaggcttcaccaaagattggatggagaaagccaggcgctgctgagcgcttaacgacaaccagccttctccccagaaccggctgtgagcacagctaagaatagacctgggccaggacggtggagtctctctgtgcgagagttctctgcgggaatattctaaactccgcagtggagccggctctgcctcagccttgccgagcagggggccaagcgtgtctgagtcagttcagctgctgtaacaaagcaccgtgatcggggtagcttataaacaacagacattcatttcccacagctctggaggctagggaaaccaagggctctcttttctgattcctagagtgccatctttgtgctgtgtcttcaaatgtcagaaggagaagagatctctcaggggtccctttttataagggcactaatcccattcatgagggctctgtccttatgacctcaccatctcctaagagcccctcgtccaaataccaccctactggagattaggtttcaacatatgaatttggggtgcaaggcacaagccctcagtccatactaatgtacacgtctctacctcctcagctgtgtgcagagcaaccacctttgaaagcaaatggttcaacatctgtagcaggaaaaaaataaacaaacaaaaaaacccatcaactcctgcagtgggctcattcactttgcatccacggaatggcttaaatcactgagtatgcaccaagtgtctgtggcgtgctgtgtttgcttggtgctaaggggcacacagcggagaggacatatccctgatcttggggaacttggattgatactctttggaggaacaagagggatagatgggaaagtgaaaagaaggccaaggagagatcacgagggaatttagtttggcaagtggggagggaagctgccttggcagttcgtggggtggttggagaagtaaggaagagattgggagaagccgggcctcacaatgtgaggaggaggagagagtcgggggtgcccatagggccgaaagtagcagagatgcccaggacaccactgggcttgtgcaggtgaagccgtgggtgaacgaaccttcgagaataggctcagtggggcggaagaccaggccacgcagctgcacaagatcagcagggctgggttgagtggaagcaggaggaaaaggatggggaaggaacaggagaaataaacaggtgggctcctccaggaaactgggcatgacacggaagacgaggtgactgttgggcatctgtggaacatgaggtcacatggtggcgagtgtcccactggtcgcttggattgggtcgatctgcccggctagtggtgtcagttaccaagcacatatcacccacccgagtgttgcagctgtaaaaagaggccctgctctcacaggatgatgctgagcacatgtgggagctccagtctcttctcttgcaggaaacctataacccacccataacactgaggcatctaacttttgctaaagagttgctcctctaataaaatcctgtggtttgaataggacagaacctagggatttgactcttcagagcatgataaccaacactgcagggtgaggctcgctggtccgagtgagccagaccagtgagatgctgagacttttgagatgctgaagcctcctggtagaggggtgcagccataactttgacccagggagcactgtaggcaggcctgggggttgctcagtaatgtctctgtagctgaccacgttcactgattcaacagatgtttatggagcacttaaccatatgggaggcccagtgctggggctatggtgggagcatgtcattcatgggctctaccctaatgctcccaagcaacatcagatcaggcatggaaataaggactatgaccttgtctattcttgccttagtatttttaattaatttatttattttgagatggagtttcactcttgttgctcaggctagagtgcaatggtgagatctcagctcactgcaccctctgcctctcaggttcaagtgattctcctgcctcagcccccctagaagctgggattacaggtgcccaccaccatgcctggttaatttttgtatttttagtagagacggggttttaccatgttgtccaggctggtctcaaactcctgaccacaggtgatccacttgcctcggcctcccaaagtgctgggattataggcgtgagccactgcgtctggacctttgccttagtattttaagagtcttctctgtaatggatatttacccagagttccttcctgctcagtctcttggcggagatagagaaatagtgtttttcagcagccacatctcaaagatggtacttgtgctgtggatttccctggtttgagacctcaggcttcccactatcctctgatatagccccaaaggactaatggaaagaagcacctttttttctctctcttgtcactcagcaccttccagttggtgggatttagagactgtcatcccaaacagagtgaccacgttagggccagactgaccgacacccacaaatgtctcctgggctgaagtagctgaattctccttcctaaattctctgtttggccacttctgaccagtgctggcctcgtttccccttcgtcttttagaaatccaattttacaagctgttggtcttgagtgtggacggttgcattttattaatttgaaaaaaaatattatttctaatgactcctctagccagttcttcctcctcgcagagctactgcctgtgtagaagggggctttgtttgcactccttttattgtcagaagtgtgagcagtgggctgtgggcagtgtgaaaccgcagtgctgctgtgatgaagcatcacgcattttccttgggctgtcataagaggggaagtggtgtttgtgcctttgctgggtaattcatggggtagtatgtagtgcttttaatgatgcccaaacaactcccggtttcctgcacagaactgacctatcccacttgccactaccgtgaatgtcccattaccaagatggaaacacacccctttccttggaatgccttttcttcctttttataacaaggccattgttggctgtgggagatgtgtgtgtttgtggcaggtggttccaggcctgctctagagatggctcctcactgcccaagatgtgacaactgacccccttagcaggtgcccctccaactacttagccctcattgcccacctcccttggctgacctgatttataccattgcatgtggtcagttcagtatcctcaaagtcactgcccaagcagctctttcttgtctatgctgcttcttcctagcagtccctcaagattgggtttaggtccctcccttttcccagaagcccctagtgtctcctgtaggccccagtgggctctcctcctctaaactttcatgttctgtgtgatcctagcagcgtggctggctcagcacgtgatgacagatgggctcagctctcacctggcctcctgcactgaaagggccttggggaccaggctcttgaatcattttccttgtgcatcctaggagtgcccggtgaaggaggagtcgatgagttcctgctgtgggttgacccaattgattgagagatggataactggaccccgtggtctgtgtagttttgtgaattcggagtttctttggggtttccaaaatcagaaagggcaggagaaggatgaagcttttagcaagacagaggcagatcttcctagacgtcccctgccctgcagttgtctggtcccacatttaagatcccagaattgcggacctggagacatggggcactgaatcctgcccactggctattagtcggcgtggtttactaaatctccttgcccatgaatatggtcattgtttaactgatggctgctttctctaccaggagcgctcagcatctcaaaatggccttgcgtgagcctaacacaacaagaagtgatgcttatttttgtgtattggctttcaaggctgactggttcagaactgcattgtaattctaatggcccctactgaacacactgtcatcagagagattatgtcattgaaaacaggaataacaatggtacaatcggttaaattgtttacccttattggacaatggtcagtgacaagttcatgtgggttgatcaccttcttcttgctttcttacattggcttcccctctctatcaggtgggagtttgtgctgatagagtgtgtgtatctgcatggaagtgtgtgtatctccctgtgtgtgtctgcatggaagcatgatactgtggaaataactcggattcttttgtttgtctgacccagatttgaatcccaactctgtctcttagtaagtatgacctcagccaggttacctatgcccatctctgatgtgagggtgactgggcacctctgtagctgtattgtgaggggtggtgcattggtgaggtgtgcagggtggtggagcaggctggcacccagtgcccaggcaccccgtgttttccgtttttatggcagatggcaataatgcccgggtgtgcgggagcagtgataatggatgttctcggcctttcggttcactgcagtgttcccctaaagtagatcattattctgtatggaataaatagtgttatcgggctgatatgcttaaggctaatgagcccatgtctagcatctgagaagccagataacaagacatgtttttctccattggcttctattgatgtattaattaatgaaatccaagattcccctttgagctggaagagtgtttaaatcactcttgagctgtacacagcactgtctccctcttgctcccagatgctggagaggccagggaaaggcaacagggtcttctgcctctggcctggcccaagcggggcaggaggaggtatagacatgaagtctgcaccagacatcccaggcttgtctcagtcccagtgcaggccacatcacagctgcaggggctctgcaagcccctcctccatcatcagccctgggggaccagctccggcagcctggtggccccgggcccaggcttgctcttggtctaagcatctgctccagttcacattttacctcctttgggatttctgtcttccaaagggccccaggacacaacactgaaattcactgtgtttataccaactcaaaacctgcccacaaaggaggttgtgtcatttcagtcctgggcaaggcttttgtacccatgtggtaggttggtgggttttgagtgaccatctccttttgcaagtagcagcatggaaaaggtcacagtgttgatattagacacgcttgtgttctaggccccatgccagcactgagtagctgcttgagcttagtcaatttgtggaaattctccgagcctcagtttcctggtctgtgaaatggggattatgaacatatggagcccaaagcgctgttgtgaggactacatgaactagcatgagtaaaagaattccaggaataaggcctgcaagaatagattatcaaggaggcagggatgattcttattgtaacaatgatcatacatctattaaatatggaatggggggctaagattgctcaaaaggtctttctcacaaaagtgaaattgcattatttttcataccttccagtaactagcttttctaatactctggtgagaaaatatccttaaaaatctgcttcaatatttaaaattggtgtgattagcaccttgttttccatactaagggagaagggcatctgagaaaaagttgtcagaagtggcgtatacatctctccaccaccttgctggagccataacgtgtgccttggcacccggaactaaccacagacttcctgcactccttccataaccacatacctcacatcctatagatagccatctagcctgcaacccataagtaacttaagccccaacatcctaaaggtaaccatgtacctctgcaccccatcagtaaccatgcacttcacatcttacaggtgaccatctaccccacactccgttagtaacctgagccccaacatcctaaaggtaaccatgtatccctgtaccccatgggtaaccatgcacctcacatcctatggataaccatgtactctgcaccccataagtaacctgagcctcacatcctaaaggtaaccacgcacccttgcatcccatagataaccatgcacctcacatcctatagctaatcatctaccctgcaccctataggtgacctgaacccccgcatcctaaagataatcatgcacctcacatcctatggatagccatctaccctgcaccctataagtaaccttagcccccacatcctaaaggtaaccatgtacccctgcaccccatagataacaggtacccttgcaccctaaaagtaacctatactctcagactataggtaaccatgtattccagaatcctttaggaaaccatatacttcacatcctataggcaaccatgtacccctgcaccccataagtaacttgtacccctgcatcttcaaggtaatcatgtaccctgcaccctgcaccccacgtacccacacacacaaggccaagcctgcagagtggagtaaagttgcctcttcagtctgtgttgtctcacatgcaacattcccacgtgctgttgccccctccagcctgaaggaggaaggcagcctcagaaggcttcttattcgggcccacctttgctcctccctgggagcatggcaggtgtcctgctctggtctggatcatacagccatgaccatcacacctcaccctgggacgcatgtgctgcacgtctttgccttccatggtgaacctctgagtctctctccctgatactgctattggcagtaggcagcctgcacaccctgccaggacaccatggtgattagcatcggtcagtattcaccaccgtggaccccaaaacttctttctcttctgcatttcgtatcggtacacttaatgttttacaactcacattctactctatttagaatcaatagccactcagaattaaaattcgagccgaactataaaccataaaagcccttgattatttcattagtaatttactaattggcattagatatttaattacacattccaaatatttgatgaattattttagctctgcatagaaagccagtgatagggactatatttttcaggaaacaaaaaacccagagagatgccgcgcgggaagggttagtgtctatgcgtgtctgaagccggaacaactggtggaaggatttgccttttctttgaaggaggccacccagacagccattgagtccagcttggtatccagtgacccaagcctgtttctctcccgtctttgttcaacaacacggctttctgttcccccttttcttttggagacgttatcttttctgctttgatctgcttcccacaacataaggtgatttctcttcttatcctcctgatgggctgtgttttgacatggataaaaaggagtcagcctctcacctcccgtcactcgctctcacccagtcccttgtcctcccaattcatctcgcagcaggccctgtctgcatcggacaccagatggcccccacagccttcttagaatagatttgcattagataccactcggtctctggctccctttcttaaggtgtgggagctgtttctctagaaggaaaaaaaaaaaaagataatttcagtacaagaaaaaaaaaacgcacaaatgttcatttctgtttcttcagggatctttctgatgataagtgggcactgaattcacgcagccccagaagtgccttctacctctctcttcactgtgcccaggaccccatctactgggcacccacctatggaccaacatctccgtgggacaattcaacaaatatgcgggaagatgtacattgaaagatgggtgtttgttcttaatctgcctggctctccatagacatcagcttgtctatctgttgtgggggtggcctgagagctgaactggacccaaaaaagcaaaacagcacagctactcacgcactatgctcaccctgggccagacccgggggagagcaaaatatatttctcactgattctcacactgaatcctctgttattctcataacagattgtggcaggccatatgtggaacttccgttgaccattccagggaagcccagggagggtgaatggatgatacagaagagaaggctgcatcccggtcacaaacctgcaatacaaatcagaaggaagaagttagcccttaaagggccagccgagccccagtgctgtgccatgaaaggcatattgtcaggaattacaacatggacccaacggcccttatttggaagatgcaaatgcaagtctcctgccagacagacttgctcctaagtaagagtagccatttgggatgcctgtgcaggagggtgcaatggaagcttgaagaccaaggaatccttttgtgtctgtccacgaacactctaggaaggaagtgggaggcatgaagagaatttgctaccagcacaccctctccagcttagctcagcttttaattggatctttttatttttttcttttgagatggagtcttcctctgtcgcccaggctggagtgcagtggcacaatctctgctcactgcaacctctgcctcctgggttcaagcgattttcctgcctcagcctcccgagtagctgggactacaggtgcccaacaccatgcctggctaatttttgtatttttagtagagatgaggtttcactatgttgtccaggctagtctcaaattcctgaccccaagtgacttgccggccttggcttcccaaagtgctggaattataggcatgagccactgcgcccggccataattggatcttgagccatcacttaacttagctgtaaaatggagacagtgtgccccacccatctcatgatagagggaggatcactgaagacaaggtcttgggaaagtcccagcaccaaacctcaggaagggctggcaggtggaggaggagaatgattgtgtttcaccgagccattagctttactcctccttctctggcttctgagctttagaatttatctgtattttaaccagcctgtataaatagatataccaggttttatgagaggctgcctcaaatccctttggaaatagggtgggtataaaataaaaaccaatacagtaatttctcaagagaaatctagctgcgatgatcaacatcaaggagtgcctttgtttctctctggacttggagccactttgaaataatgaggcttccagaagcaggaagtttgtcctgtccttgaacccccagggtgcatgttctggggaaaggagaaggttcaagtctccacgcaaaggatttcaggcatgttccccatggtgctgaggtggacctctaagccctggcctcctctgtcccagcctctatcacactgcagccccagagcaccccctccactcaccaccagggcgtcctccccttgacctgctcacccctctttctggtcagcttaatcatttccaccactcccaagacctctggaccaatcagctcttcaccaggtcaagatcaatgtttaacaactgaataaaagagggaatcccatcgtttaattggaaacaaagaatggattgtagaaagatctttatcatctgggtaaatttcgaagtcaaggtgtgacagttctgattaactgattaagctgattcacttcgcctggcttgcttgtctccccaccctctgcttgcaatcctacaagacctttagggcccactgcagggctggtacaggaagcctttacaggtcccttgcagaatgccccctaaggttatctgtctcttatccctggggcactcagcacctctcttgggtttagctgtgtctggtctccttccttccagggagctgaccatcctgttgctgctgttacctgctctgggtgcctctgtgtttatttcacagtgtaagacctggcatagattaggtgctcaatgactattttgtttgtgaattggtggatagatgacataaactgcagacgcgttcttggacagctggaaagggaggagacccttgggatttggaatgccactgactgccctgtacagagagcactgtgaggctggtgtcatacaagtgtccaacatcaaggattttgcccctagactcagaaagggtgtggaaaaaagcagcaggaagagaggcagggatgaatgaacttctcctgggcaggacaaggagaggagtcctcattgactgagggtcagagaagctgcggccctcagggctggctttcaatttggacacaggatcagagtgatgggggctggcatggccagggatgggagggatgtcaggggctgccaccccaggccaaacgccacccaaagagactctttacatagagagacttgtgtatttacctttagggtctttgagcttgtgaaatgcttttctacttggaagacacaaggtagaaaagcagccgcttagaattggagcaaaagagatcttgggagcacaggtgggggacgggagagaacagaggaggaggtgagtcttcagaggggacatttccatgggccctgattgtacgtgcccagcagacttcaaccaaaatgcctggttccagccaggtgtggtggctcatgcctgtaatcccagcactttgggaggctgaggtgggcagatcacttaaggtgagaagttcaagaccagcctggtcaacatggtgaaacctagtctctactaaaaatacaaaaattagctgggcatggtggtaggcgcctataatcccagctacttgggagattgaggcacaagaatcacttgaacctgggaggccgaggcttcagacactcaatgagctgagattgtgccactgtactccagcctggggaacagagcaagactctacctcaaaaaaaaaaaaaaaaaaaaaaaagagagagagagagagaaacctcgaaatgcctgaatgcctggttccagatcgcctcagtgggtagagacccaaataaataggaaccacccagttttttcctagggcataggcgcaattgctgtgtttggattttttttattttattttagacctagggtcttaccactcagtctggagtgcaatggcgtgatctcaactcactgcagcctcaacttcccaggctcaggtgatcctcttgcctcgccctcccaggtagctgggactacaggtgcacaccaacacactggtgtccttcttttgttaggatgggatctcactatgttgcgcaggctggttttgagctcctgggctcaggcgaccccgacctcggcctcccaaagtgctggggttacaggtatgagccactgtccctggtgatttagggaatcttaagagacaggagtgtatcatatttcctgggtcttgctacctagtgtttgagccaaacatgcatagacccaacccactgcccacacatgtatatacccatgcacatatgacccgaggttgtgtaggagatgagaggctgtgatgtagcctggcccttacacaaccctccctgtgtgcctccctcccacacataggtcctcctgaaccctgggagagttggccgctgtgccaggggtccctgcccccatggagctgagagcctagtgggagagacacacacccaatcaaataatcagatgcacaccagtcaccaggaaaggtgacattttctaggaaggaaagcaaaggcatttggctgagggggacagataatgggatatcacttgactcagttttggagaggtcagagcatgccttacttgccttattttgataaaacaggaaaaaaatatttaaaagcaaaagggactgaggccatttgtgccttctaaggatgcctatttgtaggggatggggaggagcaattcacctccatcaggaaatagctgtcctttgtccttgggggctgaaatttggagaactggcctggtgagggctcaggctgctgaatttaagaataggttcttgcacctgcacatggagtctggggtctgaacaacaggggataacttgctttgcataataaagtgctagaagttagatgtgcatctatttatttgagttgctggggtatcagatggagatagagagaggagagaggtgtccagtaataaggggaagggtgaagtccaaatttgtggaaaggatgagagaattttaaagaagagagctctctatcactcagttttattttactttactttattttatttaattaatttattttttgagtcagggtctagctgtgtcacccaggctggagtgcagtggtacactctcagctcactgaaacctccacctcccaggttcaagtgattctcctgcctcagactcccgagtagctgggattacaggcatgtgccaccatgcccagctaatttttaaattttttttaagtaaaggtgaggtttctccatgtcagccaggccggtctcgaactcctgacctcaggtgatccacccacctcggcctcccaaagtgctgggattacaggtgtgagtcatcgcgcccagccagaggtatcactcagttttaaattgtctgctgtgtggaagtgcccctgctgctgccccctcctcacccacaagcctgttactcttgagtcattagcaaggtcctctaccaagctgcccccagtaagtgcaactttagatgagaggtgaaaggaagttgaagagaaacagggttaggctgacggcagcggtggggttgaattaaagacagcagatgctcctgaatttgcccagagctggaagtcagagccctaggccctgggactcttgggaaggagtttggattcaccccaggtcacgaggtgaggattggagctgctattgacttgacatctggattacattaaggccgagaactgggatggagaacctctttatctgattatttggtactaacattagtcagattttaagggggaaaaaaatcagaattataggattgttacaaacaaagcctttcattaaatctgagtatgctggataactgacgctaatggctacagagtgtggacaagtgggtgtcctgctgaacctgcactcctgaaggaccgagggccttttgggacgaggggggacctgccgacacccagggtaggtctgagacacttgaaaactgctgatcttaaaaggttctagaaatggtgtcccacagtgtctgttcacagagcccacactcagcacatcttttgcgcacaggcggagcaaggtacagtctgcctggtccttgtctgaatttctacttattcacactatttaggagcaaatgaataaagcctcctgtatcaggaatttcatagccccaaatcaacttggggaatccatcatgggcaaaggttgcagctgcacctcaacgtagtacctttgcaagaggaacccttgctccttcagccccctttggagtgcatagacagaatctgcctttgaaagggcgtgccctggagcactggagggatgatttagggtgagtgtttctataggtttctcaacagcggcactgttgacgctaggggcctgatgacattttgtcctggaggttgccctgcgagcattgtaggaagttcagctgcccctcggctgacacccatagatgctagtggcactcccacccctccaaggtgcgacaaccaaaaatgtctctggacactgcccgctattcccgggacacagatttgcccctagttgagaatcattgatctatcggaggcaatttgcaggcacctgccctcaaagagcataaaatctgtgattaaaggcaaaacccgtgctgagggcagaggccactgcatcaaaggaagccggggagggaaaagcccaccttcatggtcgctaataactctcctcgtaatttcaattccggcgagtcctttctgctttcttcttttctaagaactatatttctgaggtcccaagtgacacattggactcattaaggcttcttaattcccacatgaattattgctggaagggtctgaaggcccagtatctcgccttattacacctgtagttatgagcagtaactatggcctttattacaacattcagcaccagctattaaatgtgaggcatgaaaatgattatttcacccccaaatccacttaccactggcacatttccacgcatgttctcataccaaaccgaggagcattctgccgacgaccctgccaaatgccgagacctctctgtggggatgcccgatttgctgaggttgcctgtcaatcattcttcattactgtttatagagtccaatttcaagatttccttaggtgttggcattagctaatatttcaataaataaagcaaaagctagtgctgtcactctttcccatttcaccaaaggatttttctttccctacagaaaatcagtagggctaaaacattccttgtttagcttggggctaaacacaccctacatgaagcagaaaaaatcatctaattttttcaatgaaagcctatgccagtcaaagacattcttacctactcacacttaagaggcatcaaaaatgtacaaatattagaatcctcggcctccacaggcaagttgccatgtacacaattatgaaagggaaccaaattaagagggaatgtgcagaacgcctttgaaatatcgaagaaaccgtgaacgctgcttcattttaatgtcttagatttcaccgataatgaggaaattgtcctcgttttcatgggtagaggttcttaaaggttttaaaatctgaatagtaatgctgctcaattgtgcagattataaataacttttgacaaatccagtgccttccattttgagtccactgttgaaaatacagagagcaagtgggaaacagagagagagtccaggggttgcataggataccattcaaagaagggaagaaagagaggcatcctggtaacaaactctttctctcccaagaaagagttaacagaaagaaataaaatcagatatgtgtagcctccagacgtccattaaagtgcagaatgctgttttctatcacagattatatgccagatgttcaaactatctctaatcattgcagatgtaatggagtagaatgttgcagtttgtgagtttactggcattaatcctatatactgcacaagggaaaagattttaaatatataattatatctcattaatactcaggttttatttcctttcaatggaacaggacttattaaagcaaccatttaccgcatgttttctttcagtatttggctccagcataatcctgtgtgcatttgacgtgtaaatatgtactaacctgggtgcagaaaaacacccaggaatggctgtgagtccaccgctaccaaaatttgcttttataagcatgagatgtttttatattgtaaattgataagagagacttaaccgcatactttctgagtcgctactcgggttttcttcatgttggaaatatttgtgtttcttcatttgaaaggaaattgccttcacttcggctctttattgcacgtggggaaaaggtgcattctggctccagagggggcctgtgcaggtacgggtgagggccggaacccctgagtggcacctacattctcttgggcacttgtgggacccactaaaggactaagaaagttgtgtggttgttgttgttgtgtttttactgagcatcaccatggttagggtgtatctcaaggggaatgcaggagtgaggagtaaagaaattccttcttgagcctccctggccactcttccctaaataaaatagcaaccttttcaccaaccatctaaactgggttggagtaatgaatactaacaccaagccatctcccgggctgatggccagcttcctccgtggctggagcacattcacagaagcctctctggatcctttctgtggagccggagctgtccctgcatccttccccgtgagcggggaatccatgctgtcccaggggttgagttcctttgctggctgaggctggccctgtggacggatggatacacccaccgctagatgggagacacgggagcttgcttcctgataaggacagaggctgaattttcggcaatctgctctttctcgcgactctgggttcaatggctgtgacttatttggtgattctggtaacagactcctcaagcgcaggggctgcatccaccttgctccctgatttcccccacaccagtacagtgcctgacacctcatcagctctctccttacctctttcttaagtgacagaataaaagaataaattactgggtagtgaaggtcttttgggaaaagctgggtggggcttacaatttagtacaatgtccttagctatcatttttggcgtggaagagagtttgatggattctgcaataatgagattgacgagacagatggtcgctgccaggaattcagcagaggccagggtgatggagaagcaacggctctgtgtcagaagcaggggcgggagcgggaggtgttggaagctcagtggtggtttcatacccctggggaagaagcgatctgcaggccgggtggtgaatgggatgcatgcaagcctgaaacgggagtgctgagctcacaaagcagagtcatctgggatatttgggtggaagctctggggcgccagggaaagtcccaaaggagggttctgggaagagggtgctgcagacagcaataagaggaggagattggaaggaggggcaaagcagttcatggggatccctggaactgagtccagctcatccaaagcttctatcttctgcttttattttataatatttaagttataagtggatgctgccaattaggtatacagatatacagcctctctctctctcttcctcctctccttccttcttcctcctctccttccctcttcctcctctccttcccctttccttttaggacactaagatcaacaggaataaaattcctgagtatttatctcctgaggggcagagctagaaagaggagatctatgcagagtttccaatttagaattatattaaatggggtgggggaagctgagtgttaatgtccttttcctttttgggatttgagtcctctgggagccaggactcagagagcagtaggcgtggggcctgggctgcagaggcagctaggggctggagcaagtgccccagggaaggagggccaggctgagcatgggtgagagacctgagagcccaggacaggccacttccaatggggaagaccccggtgctcccggctgcccccagggccagtggccagtctccgaggggcctaagagctggaggaaaagggctgtcaagtccggagggcaggagctgggctggggtgaggggaggtggcagatgaggggtccatttaggaacaaggccctgctgatatggaggaaacagaaagaaggtgagagtcagcacggtcgcttcaaaatggtgacaactgaaatcttctactcaacaggaatggaaaaccaggtaggaatagaaacctggaagagccagatgaccagaaaagagcacttatgcattttggaaaaggacgataacctcgtaccactaaaaagttaactgaaaaaatgttttaatttcaatggtttttggggtacaggtggttttcagttacatgaacaagttctgtagtggtgatttctgagattttggtgcacccgtcgtcacccaagcagtgtacactgtacccaacatgtattcttttatccctcaccacccccaaccatcccttccgagcccccaaagtccattatatcattcaaaaagttagctttctagggaaccttctctgttcgcacatctgtctccaatacaggactgtttgctctgaatgggagatctgtcttttagtgaatgtttgccgaatgcaagaagaaagcacaaagtgaatgaaataatagataattgatcaaaatggatatgtggcaagggtcatcacagaggactacacaagtgaaactcaactatccttaagagttttaaaagatgtgacatgttaggttgcctgtggggaacccatgaatcggcaataaggaataggaagctcagtccaaatagttgttgaggatcattggtgggtgatggggcacatggctgcaatcaccttcacgcaggtggtcctgaggaagttaccttgccctgaggcaagcagggattatcccgaggggagactatcacctgcagctagatgctgggttccaattcctcggaggggcaaagagatccgacaaaagctcagtgctcagggcccggtgcaggtcaggcaactcttgctgctgactgagcaatgcagtcccccttcacaattaggggtgggcatggtttgttgttctgggcacagtgaaaattacctattagcagcacagaatcttctggaaggcctcatggaagcatatccggattgaactttctgtccagatcagcctaaggacactgtctcccgtgtcatggggaccactcactgtacgctgcactgaactcactgttttttggcttcctagagtttggggtctgatgctcacagcttggctgtcaggcctccactgcatgtaagtgttcacagatgcacctctttggccaagctctggaattccctcctgctctgcactggaaacggacagtgtgtctgcctctgtctctctcttcctagactctcagcccctccaggctggggttctgcagcctaggagcatgggctctggagcctgcctgcctatgtttgcaaacagagcccatgctttcctcactccaggaccatggacacaccttggtttcctcatctgttaagcaggatggagttgttttcaggaggaaatgaacgtgcaaccatagagtgctcagaaaggtgtctggctctgtaagtgttgcaggtatggttccccaggaaacaggccctgagaagggggctcacatgcaggaggtgtattaggaggttccctgggaatcaacacctccatgaaggaaggggaaggaaagaggactggacagagggagatgtcaagctgctgcatcagcctaacaatatccacggcctgtccctgcagggaggtctagagtgagattagctctgcagaattgcccagagctgggctgagatggcaggctttcatgcttctttgtcagtcaggcactggatgtggtgtgatgttggttgaggcagctctctgcagtaaagaccatcctgggaggaactgacagctgaggccatccgctgaactcccagaagcagacgtaacaagtccttccttggaagggacctggatagtgagtcatgctgtccaccaccatcttctctttggctgttcagatccacttcttcatatgcatggaggtagcgccatccccgggattcccatgggtctctcttcctgagggaaactctagaagaggaagattcatggagtgaactccagcccccactgctgccgctggtcttagggtcctgactgatcctcaccatctgctttctccatgattaattctctattttcattagcaccggtgccagtctcaatggcttacttgaagtcatcacccatacctttgcccataaagggtttgagggtttgagtttctggtgactatacttttctcaggtcaaggttggtgcatttgtccatttgataccacaatggagcaaagaaatgccacccaggtaagtgccctgttagaggagtgaaacagctttgttgtcaggggtaatacccgaggttccttgccttgtaccagacacatgtggagtgaggctaagagcagcggtttaataggtgaaagaaagagaaaagagaatagctgcctctcctgcagagagagagaggggagcccaagtaggtcttccgcttttgtggtgaagtgcacggggttttatagactggcttgaggaggtggtttccgatttacatagggcccaaagattggctggaccaggtgtgacatttacatagcacatgaagaagctagataccccaccctaaccttctcttgtgcaaattgattctttacctggccagtgccatgatgtctgcccttgctgtacatgtggttgacaaagcaaagggaacatggggccgccatgtcgaacatgcctaacccccaggtagccttttcctattgtcacagctgccggcattcactcctgcaagcttccagcttgcttatctatgtttgcagctcaattttacagactgctttttgttaaaaaagaaatgatgtgaggcctgttttttattaaaagggaaacctgaccaaggacttccttaccgtcactatctgcctaaataatttctttttaactcctatatcgggggactgaagggagactggtaatcattagagtcccaagtagcaggagaaggaggcatggcaggggattttctgcggctttcacagggagaaatgtgcaagtggcataagcaggatcaacaagcttaggattggcaactttgaataattttggcagactccaaggaacagggactgtcctgagttgtctggttccttgtcctggggaaattaggggagggaaatattggccgtggagcataagagacctgtgagagcccagtaaaagagatggttggggagtatgagctttggattggttggttcatagccctaggagagacaatcacttcctggtcaggtctcaagatgtcaaagcatcacaaaatacagaaacttaaatatagaattcatttccttgcaggcccctgaccatctggtctgggccattgcccatgagttcatacatactctaacctcaggctacttctttgttcatacaaagtgcatgaccaggcacaacacctaaagcatacccattgagaagttttctttcccctctgcctttccaagtcattcctgggtactgggtagtaatgcagctgctatctattgttatctttaatccacacactgagctcacccatctgtgaaccaaatctgatctttttcctcttgtctgaagaccataaggtatcctgaaagtcatagggtgtgctcagggagagtagtgggtatcagagtgtgaatgtgaatgatatggagctcaaagctgcctgctcatgcaacctgcctgtgccccctggctctgctgtgcttggtcccagattagccactttaatcctccatggattattgctgggttacctgatattgttatgtgtgacagaacacaactcatgatgggtcctctctcttggggccccatggtcaggcactccttctttatcaggtcttggtggctacactgggaggtatttttccaaaggcacattctctgctgtggaaggtatggccttgatccaaaaccctaggggtctacattgtgagtcttcctttgggatttgttttaaaactccacatgacatcatttccttcactgacaatttttatgctttggggtctgccagatcataggtccatctgcatcacaggctggacctgctacagagctcttttctcttctgggcctcatacaaaaccagcagcttttcatattacctggcgtataggtgacaacagtatttccacatgtggaaaatgctgcctctagaatccagagtctagaaccagatgtcatgctccatcctttatgatgggagctcataatttatcttttactatggaagggatgtactgtcatgcctttgaccactgaactcctaagaatgttagtgatgtagccgactcctttgaatctttgaaggagttcttttctcaccctctgcaatgcatgtgtcttgtcaaagcctctgtcttagtgagttcaggctgctataacaaaagtaccacagacggggtgactaaagcaacagaaatttattactcatagttatggaggcttggaagtccaagatccaggtgctgactaatatggtttttagtgaggtcccttttcctggtttgcaggtggatgcctttttgctatttcttcccatggtggagagagagtgagcagtctctaatctctttatttctttataaggacaccaatccccctcatggggactctactttcatgacctcatctaaacctaatagccttccaaaagtctttcaagatgtcctcatggctcaggtcactttaaccatattatgacagagggagggaacgctaacatagttcttgggaaatcctgtgaatgtacacctttgctcatcccagaactgtttctgatcctttcttattgtgatagaaacaaaaatgcactcactagatcaaaggctgcccaccatgttcttgagagcatgtgaatcagctctaaggaagatattataactgatatggaagtctcaattggggtaactgcttggttaggtatgaaaagtccactgccattttccaggatccatctggtttttgcaggtctagaccagtgagctaaatggagatgtgatgggagccaccacacatgcatcctttagatctttaaaaagagcactaatttctgccatctccctgggacacaacattattattttctaccttgatttggggaatgggcccagtcaaggactcaatttttcagtatatctatgctaacatccattagaggactggaaacattaccaccaaagtgtctatgagtccagtggagcctccatgaagcagcctggccaggactccaatgattatatatctcccttctaactccctttgacaggggactgtgataattctttgggtctctaggtattggtgtctattcaaactctgtgtccaccagtcttcacgatgtttggatgtttcccttgccctagtccacagtgcaatgccctctgggaaaggactcagaattatgactgggtccatgtgccatggtattacaagaacttcccttgggggctataacttcagctgcattcaacaggctccaggtctgaaaagtgcacgagcagtcctggctttttcttgcagcagctgctctcagtcttctaaccagcagtctttgatttcttttgacggtacaaattgagcagtactcttgttgactactcttctattttgccccacactgtgttctattaaccatctccatgtctctttgcagatcagatcccctggctgcttctctaaccttgctacttatgacagtaattgcatcctcttggcttctgaaaatcaaaggccgcattgtattcttcctctgctctttcagtgttccatcatctccattgccattggtgagtccagttctgtaacagcctccttttccaccagctttggtccacagaagagagttgccattgaacttggtagtgatgtcagtgcttctctcgccagtgtattcccattggccttagtgaatggtatgctctccaagagttgccatggactgtgatgtgttttcagccgtatggagcatatccacaccagcatacctacttttgccatctttcaaattttttcttaacatttgctatggcaattctgacatttcaaccccatttgcttcttccacactcctagaagccatcttactatcacatctctccattttctgggattcttgccaaggtgttaaatcctgaattctcaaagagtgcactcaaactctttctaattcagtctgttgttttgttacagcctggcaggttcttctttcctgctgcccagaaaaagccaatatgttgagaacagcaggtgctgcagcagagaaagagtttaataattgcagggcagccatgcaaggaagacaggagatatttctcaaatccacctccctgagaattcagaagttgggattttaaagggttctttggtggacagggctttagggaattgaaacaattgatctgctggagatgaaatcacaggggtgtcgaagctacaactgagtcagctcctggctgggttttgcaggaccagttgcatcagttttttggtgtgggtcatgggtccaagtgacatctcttggtctaccaaaatgctaaatctaaaaaatatctcaaagaccagttctttaggtctcacaatggtgatgttatctataggaacagttggggaagtcacaaattttgtgacctccagttatgtgagcctgctgcagtaggcaactaaagaaaagcaagttaagtcaggaatggatggttattggttaactgtgtctattctttagcacagttcagacccctaccagaaatcttaaccttgttgtcttttattagcctttacaaatacagtttcagtctttgaacaaggaggaagtcagttcaagaaaaaaacaagtactgacaaaagcaagttagcttgtagtggtagaagcagaatagaatcagttatgttagatttcccttactactataattcctgcaaagatggcttcagtttcagtccccttggtcaagcactttcagtatctaattctgtatctaatgtcctggctgcaggtggtacctgctggacaggtcttgcagtacctctatggcatgagcactccatcctttttcattcccagcatgaccccagctgtgttttgttgtgatttcatcttagtgtgggagcaggcaagtggaggaaaatgttgagtggcatgtatctcatgatctgggaaaagcctctgcattgccttcaagcaagggaaggagttacctcttaagagggaagggtgacccatttctgcaagtccagaaggctctggggagcctggggatttaagatttcccaaggcattaattcagatgtctgcagcccagtgtcagggtccatttgtttctcaactagggccttgatgttggcatggcagacctgcctggattggggattgagagtctaacctttggagctcagctgctctgatgacaccattctaggcctgatcctcagctctctgtaccctcctactgtaagagatgaggacctttgatttccaaagatgcccactgacttttaattggtgattatttgctcttatctttttattatcttttcccagataacaatccagcttagctggattccatgtttcatttagttacatttcctccatatttctaactacctgataaatctcaccagcaaacacacccccttgaatgaacacaccatccttatcagcatctgtgagagttttaacaaatggactaacacctatcatatgatgggagccttattgtcagtggagtagtgattgaatcatccagcttcaaaatctcgcctcagggcttgctttttcttggactgcatctgtttctagttgccacagtttgggttttctagaaagaagacactgatacaaagtttagcatgcatcttgtttcattggagctgctataagaaaattccatggactgggcagcttataaacaacgaaaatttagttctcatagttctggaggctggaagtccaagatcaaggtgctggcagatttgttgtctggtgagagttcacctccttgttcatagacagctgtcttcttgctgtagaagggttccacttgcatgaccacatctagtcttaatcacctcccccaaattccatctcctaatatcatcacattgggtggtagggtttcaacatatgaattttaggggcacacagttatttagtccataacagcgcatttcatgtttatgaaggtatgcacttggcctcaatacctgtgattaagccacgggattcatcaagatgcaatgcaggctcagtgacagcctacggggagctctagagctggaagaccccttaagagccgagccaaggtggccaggcctttttacccctggggtcatcagtcgttgaatgggagatgcccaggaagaagcatgaccttgggtgaggtggcattccatagataacacgattcctaagagagctgacagttcatggccagctgatgcactcttagcatctggggccacagatactacattaaagggaaatctgagaaacacatcacagtgtcccccacaatacaggttatgattgctttgtattctctctcataataccccttcataaacatgaagcatgctgctatggactaaacaattgtgtctccctaaaatccatatgttgaaaccctattgcctaatgtgatggtattaggaggtggattttggggaggtgattaggattatgtgtatcagtttttctctcccagcccctaagacagcagacaacacataaataataaatattgttgaataaatagaactgcacaaaatatttctggaacatcctttacagaaactggttctctgcagagtatctgttggagccactgatatgtgggagtgactgatgaacagagaatttgagggccaacaggtcaggcaattctgatcctgttgcctggcttgttccttctcagcaaggtggtcatggcaggctcacatggggatgcaagctgacaactggtgtgggtgagtggccaaggttggagcgttggagtggaggtgatgtggaacaagatgtctggatgtattggagcaggcattgcattgcatgcacacttggcccacacaataaatgggaaacatccctgtttctagcaaacaaaagttgaccgttctgcagtagaagcaagtcaagaagcagatcccaccgagataggactccaacatttaaataacctgttaaatggctttcattgccaataatctgatttgcactcaggcaagacaagttggatgcctcaaatgtgtcaatatgcaacaagaagataaggaagagaattaggttcaccacccaggctttcactttccatccttcattttcttggcaagattgctaaatagttttatatggaaccagaaattgctgcctaatgctaattcgtgaatgatacaatcagtgctgaggtaaatggtatagagaattgatactggaataaattgggatgcatccctttaaataacaatatcaacaaattttggcacaaagggcaggggtctttgttgagcaacaatactatccccgagagctgaagcttggttggagagagacaggcatctggaagcggaggcgggcttgcaccctggctcctctacctgccagccctgtgaccttggcaaagtcctttacttctctcagcctttatttctgtaagatgagtaataaatgtcacagttgttatgaggataacatgagaaattgcatttagaacacttgacacagtacttggcacagaacaaccgagaaatactagctgttattatttattatgattgcttatctcccacctgaagtgctgaacactgacccccagggaaggtggagttgggggcagtcttagaggggtaagttacatctccaagtgtttccagctcattgcatggaaatccattatgcattgggccctctgagattctgaggatgggtaggaaacctgagcatcagggcactctccttcttgagggatggttgtggttacaatcccaggaaaccccatcaaaacctttttgcagttttgggaaaaccttgtgttcttattgaactttcgtaagcccacaggctgctccctgcctcccaaaggcacaacccaccacaggccaggaatttctctaagacagggagctttcctgatacaactttaggccctgggccttacactgcaaagcagtgctgagccattttccatgtagacgctctgaggatgggaagctctatatctgcctttgcaataggggaagcttctctctgccaaatcctgtcaagcacttcaggagtcatattctatttttgtggcatcatcacctgactactttattttctgattagtctgtgagttcctggagggtggaggcagtatcttgttcatgttttagtggccagcatggtgcctaggatggggcaaggactcaggaaagatctgctggatattctgtttctgggaagaaaattctggcatgatacgtagcattgatgggctaccatatcaggccacgagaggaaattagggttaataggtttcgcactgccccattacctcctctttccatatagtcatttgggtgcctcaagtcttccagatggctctgttgggttggttcctgttaaatattggtgctttttgaactctgagatgaccaaggtattttaagaaagaggttgtctcggggaagagctttttagaaggcattgtgacactctgtagagaacagtccagccctaaaataacacttaaaaatggctacgagcattacccctgtgtttagataaattctcctgaggagctttgttctccaacagactgagtttttggttgctattggttttaagatgcttatttcagtagcaaaagtcacccttggctacttgtgcagaacattgcatgtctttttatcattgttactgttattttaagcacatagtgatatatatatatatatatctccaaagttttgctttggatgagaaaagggtaagataccaacaaggactagaggtaattaaatgggtcttcaggaggatcatggccagagaccagggcttgcccagcctggccttcctcagccctccgcctctggtttcagtgtctccaccctggctgatcttgggtctttgtctgtgtgtggctttggattttcttactcttctcattcctgcttggaaactcctctttcttagtgccctcaggttacctcctccatggagattactgaatactgaattatgtgaatagctgaaaacatgctctattggcatatcaggtggccccagctcactgaaatgcaaggatggtcttgggggtcccagcatttagaaatggagggagtcttggtgttagaagtgattcttcatgggttgaaggagggggagtaattctgcaatactttgtggttcaaccttttgaccatctcgacgtcatgtttaacataagaaattgagtagcaccagttactagtggccactggaatcagagaccttctgatccaggaaattgattttatccattcatctttagttgaactggatccaaatggtggctggtaatagtcattttaacatgttgaaatattatttctaaaatagtcattcaacacaacctgtctggaagttttctggagaacagatatttttggaatccttttgacagccgggccaacacaattgtggtagagaatgactaatgagtagtcactgtatctcttagccccactgtttgcgagcaagccttattgagtgtgtactggctactgggcatgattttgtagtggatcagccctgctgactcccgacgcgtgagaaggctgtggatgttgaaggctatcccaggtaaacagataccagttgctccttaaccagagccctctcaacggctacgccaaccaaagggaatgtagagtcaagcatgaacccaggcagaaattgttgtgcatgagcttgccaaaagtgcttgattaaaaaaaaaaaaaaaaacctctgtgaaagaaaaatagaatctcaggaccccgaactcacaatgccaaaaggaaagttaagtttgggaactgagtcacgcaaaaactgcttcctttttgttcccagatagctgtcactttatatgtttgctttatctcatgtaaaatgtagatttgctgagcaggagacaatgcatggttgactcctccccatccttttctttaagcaagtgaaatgtggattttctgagcactaatcagagcctcacagaatgtcatcattgtctgcctatcctccttttctttctgcccctcgtttctccaaatattaaagttcccaaaactctttttggaaaaagcacaggacacaaaacctattggggcttgtgttccccagccccaccctgggcgtgtcctcaaccttggcaaaataaacctctaatccactgagatctgcctcagtcactttttgacttacatctccttcactccactttctccctgggagtaaactggtgtttcccaaagtgtgtgtcctcctggctcttgattgacttatgggaagaattacattgcctttagtggcttccattggagttgcaagcctggaagagtgatgggtttctcctaacagggacaaaaccctggccagggagctctgaggttacgcctctggagctgcatgggtacagtgacctatcccctaggtgtatgcacattgcctccagtgacaccagacaataggcaggctacagccagcactgaatgtcacccaacgctaagtccactcttctgcttagggtacggaacatgtgcgcttcttttttttttgagacaatcttgctctgttgcccaggctggagtgcagtgatgcaatcttggctcactgcaacctctgcctcccaggttcaagtgactcttgtctcagcctcccgagtagatgagattacaggcatgcaccaccacatcaggctaatttttgtatttttagtagagatggggtttcatcatgttggccaggctggtttcgaactcctgacctcaggtgatctgccacccctcaccctcatctcggcctttcaaagtgctgggattataggcatgagccgccaccaccagccacatgtgcacttctttatcagctctgaaaactgtgagcaactgaacttcctacaccaagggggaagaggacggtggagacagcacatgctgactgatggctcaatactccccctgtaaaacggtgaggataacatccagtgacagatgcacacgtggcttccaatctcaagaaaactgacctcataaggaggggagaaggtcagcaaggtttcccaggccgagaccctgcgaggtctgataagaaagggagcaattttaaaaatcaatggaatatttactggagtcctgagcatagtcctgcatctattgtaaaggatgcttcccaggtatctataaataaaagatgcttgcccttctgtgtgggtctcctggaagctgtagaaaggtacgagacagagaaaaaaaaaaaaaaaagccctctccatatcagaacattctgtgatagacggcatctcctactgacattttcattagcaggaaatttatgttcctatttctgtctgttgtaatgaccattcatagccatagcatggtggcggctaatggacaggaatggaaaaaaaattctttaattaatgcagaagtgaagctttttctttctgcactttgagaagccaagtaattcacagcagttcttggcactgaagtggaggtaaaataattatacgcaatttctagtgattaaaagattgtaaaataattttagttacatcttaaaattatttattttgtaaatgagaaaaagtgaagaaatgtgaataatgagttctgagtgtcagggtagattctggagaaagttcctcctggatgcctgactgcagatggcacctggcctctgagcttctggcctgaggccagccttgacctctgtccagccctgtcctgcttggttgcatggttgtccagacttggttggaagggaaaccagcccatctctgggtcttttctttgaatgcatggtcttaagaagaggagctatctgaatcagcagttgccttacaagggagtttttgtttatttgttgtattaggattctctagagggacagaaataataggatatacatgaaagggagtttattaggagaattgactcacacaatcacaaggtgaagtcccacaataggttatctgcaagctgaggagtaaggaagccagtccgagtcccaaaacctcaaaagtagggaggccaacagtgcagccttcagtctgtggccaaaggccaaagagctcctggcaaaccactggtataagtccaagagtccaagagccgaagaactggcagtctgatgtttgagggcaggaagcataaagcacaggagaaagatgaaggctggaagacacagcaagtcagcttcttccaccttcttctgcctgctttttctacctgcgttggcagccgactggatggtgcccacccacattttggatgagtcttcctgagggtgggtcttcctctcccactccactgactcaaatgttaatctcttctggcaacacccagttagacccagaaacaatactttgcatgcttccatccaatcaagttgacacttaatattaaccatcacatttgttttgatttttgttttcttttttgaaaatctaaagccaggcttcagggaagccatgtagggtgcttaaggtaacacagcgaaagtgactgagttgactggtgcaggtctgtaggcccaatgctgcttatgcctcccaaggccttctgcacgcaggtgcactctgcagacactccatccccttcctctcttgagaggatgcgggagggcacatgagagaaagcaatatggaaaattagcagatgaactaggaagaaaaatcataggcagggtactctgggcctcctgggttgtggaaaggagctgtacagagggtggtgtgttgtttgtgcagtatggctcaatcggcccttacccggcagcatccctgtgggatactccatgaagaagagacaagctccaaggcgatggtgcagggatgcccaacacgtatttagcaactcagtcagggaaaacaaaggtctcctcacagagaaatgcccctcactacactgtttttctcgttaggtgtgggtgccttaagattgccttctttacatttccacacatttaaagaaatcctgctcaaatcctagagcagaaagttctgggactggaggactggaggctacatcagcagcccagcctagtggaaaaaatgaccacattttataaattgtaaaatgtgtttattgtagtatttctttatcatatcctgaataatactacatatgcttacatacatttatatattaaagtgtgtataaaataaaatttatacaaaaccaggtagataagtttacagatgatttcaagtttttttttttttcttttttagagacagggtctccctctgtggcccaggctggagtgcaatggcaccttaaaggctcattgcagccttgaacttctgggctcaagggatcctcccacctcagcctcctgagtagctgggactgcaggcatgcatcaccatgcccagctaatttttaaaatttttggtagagatagggtttcactgtgtcacccagattgttcttgaactcctgggaccaagcaatcctcctgccttgaagtctcaaagtgttgggattataggtataagctactgcacccagcctcaagtattctttaaaggtaattttgacactgtgattttccatgtgcctactgaagggcctatctctttaataagaataatttcaccagagtaatagctatggctttcacggagtgtgcccctgccaggcactttgctaactacctaggatgcattatattacagaatctccacaactgcccttcaaggtaggtattattcccatctcttgagatgtaggaattgatgattagggagttaaatactaagtatgcattttggagcaggagtgatctggtttggatgggaacttggtcatttcctggctgtagggtgcagatagcttactgaaggcctctcagctcagttcctggtaaccatgacagctgttacaagtgcatccctgaaggtctgtgacgcgtccagactcctcttctgcctgctgtcccatggcaggctcttcctttctccgctgacttgcttttgcaccttggccatatctgtgtgggtctatttctggaaactattctgtaccacccatcagtatcccctcgctaataacaccacagtgtcccgaataccgaagcaaattctgaaatcagacagtgttgacaaatttgcagcagcatttattgaaataatttttgattgtttttcagtatatagtctcaaaaatattttattacgtttgtcctaagtattttacttttggacctattgtaaatgatactgtttttaaaatccctgtttctagttattcattgttagtatatagaaatatgataaatacttttcttttaaatcttttatcctgcaaaccttgataatctcacttactagttttaaaaatatttttgtagataccttgggattttctaagtatacaattattaatatttcttctgtgaatagggacagttttatttcttcctttctaatttgtgtgccgtttcttttcttgccttatggcaccggctcaggcatctagtaagatgtaaaatagaacttctgggagtagacatccttgctttcttcccatcttggggaaaagcatctaatctctcatcattaggtgcgatgttacttgtaggtttttcacacatatcctttattcggttcttattaggttgaggaattctcttctatttctaattttgctgagaggttttataaccataaatggttgtctaatactgtaaaattctttctctgtaccagtttatttgtttttttcttctttagactaataacaaattaatatggttgatagtgtattatattaattgatttttaaacactgaatcagccctatacttccaggataaatcccacttagtcacagtctattattacttctatatattgctgaatataatctgctaacattatgttgaggactttttcctttcttgtacatttttgtctagctttggtatcagggcagatctaatctcctaatttgggaaatagtccttcttttattttcaggaagggattgtatagaattggtgttgtttctcctttggatgtttgtcagaactcagtgaaactatctgatcgaggaggacaattttttctccagatttttttttttttaaacttctagttcaatgtttttaatagttataagatgattcaggttacctatttcttcttcgaaaactttggctgtttgtgccatttggctaagtagttgaatttatatgcacatagctttttaaaaataatgttttcttattaaccttctaatatctgtgaggtctgtgggcatgtccctttttcaattctgctgtttataatacattttgtctttctctggtattttccttgtcagctaaaagtttatcttctactttttttttggagaatcaattcttttttgaagaatcaacttttgttttctttatttttttctatttattttttattcgtattttcttttatttctctttattatttcctgcttctgcttgttttgggtttcttttgctcttttttttctagtttcttaatgtggaagcccagactgttgagttgaggtctttcttcttgtctaatgtaaactttgaatcctataaattttcctttaagcactgatttaagtacatactggaatgtttgatacaatgtcttttcattttcgttcagttaaaatagtttctaaattttctttagattgcttttttgacacgtataattcttaatgtaacttttagagcagttttacatttacagaaaaattgaacagaaagtaggttcccacccctcatcccccatgagtttccccaactgttaacatcctgcactggtgtggtacatttgttataattggccaacgaacactgatacattattattaaagcccatggttcacactatggttcttcctttgtgttgtacagttctatggatttttccaagtgcataatgtcttttatccatcattgcaatatcatacaaaatagattcactgccctaaaaatctgctgttcttcaactgtttatcctttcaccatctcaccccacaacccctggcaaccacatatctccttactgtcgctacaattttactttatccaaagtgtcatatagttggaatcgtacattatgtactattttcagattgggttctttctctgagaaatatgcatgtaaggttcctctatattccttcatggcctgataactcatttctttgtattgctgaaaaatatccccttgtatgaatgtaccattgtttgtttaccccttcacttatggaaggtcatcttggttccttcctatttttgccaattctgaataaaactactatgaacattgtgtgcaggtttgtgtgtgggcataagttttcaagcctgttggctaaatacctagaagtgtgattgctggattatatgatacgactgtttagcttcacgagaaactgccaaattctcttccaaagtggctggtgtctttgaaatcccaccagcagtgaatgagggttctggttgctccatgtcctccttaacaactgctgtcttcagtgttttggatttcagccatcctaatagatgtggagagatattgcataattgttttcacttgcaattccctaaagatatttgctgttgagtatcttttcatatgctgttttgccatctatatgtcttctttggtgaggtgtctattcagatattttgtcacttttttaattgggttgttttctcattatagagttgtaagagttcttcatacattttagatgtaagtcctttatcactttgttgttttacaaatattttttctcagtccatggcttgtcttttcattctctgaatagtctttcatagataagttatcaattttaataaagtctaagttaccgatttttttttttcatggacatattgccaaatccaaggttacttagttgttttcttttttcccatgctgtcttccaggagttttatagttttgcatttaatgtttgggactcaggtcagtgtttagacagacttttttttttttttgtatgtggatgtccagttgttccagcacaatttgttgaaaaaactatcttttctccatgtgatcgtctttgcccctttgccaaataccagttgactgtatttgtgtgggtccatttctgggctttctattctattccattgatctatttattcttttgccaatatcacattgtcttgactactgtaacactacagtaagacttgaagttggataattgatgtcttttgactttgttcttctttaacactgtgttggctgttttgggtcttttgccttttcatataaactctaaaatcagctgtttgatatccacaaagtaactctctgaaattttggttggaatttcatttaacctattgatcaagtttggaagaaccaatattttaacaatgttgaattttttcatccatgagcatggaattgttttttatttatttacattttcttatttttaaatcagaattttgtagtttttctcatacacatctagtacatattttgttagatttatacctatgtatttctatttttagtgctaatgcaaattctgttgtgtttttaatttaaaattccaattgttcattgctggtctacaggaaaacatttctttgccttactgtactagctaggaattttggtatggtgttgaataggagtgatgatctggtttctcactgttaagtgtgttaggtgttagggtttttgtagatattatttatcaagttaagttgaggaagattctctgtattcctggttttttaagagttatttaaaaatcatgaataggtgttggagtttgtcaggtgcttttgctggatccattgacatgattataaatacattttagctgttgatgtggtagattatattgaatattcaatgtcaaaccagacttgcatactagaaaaataccatttggtcatgtataattattttttatacgttttggattcaattagatgattttgtgaggaattttgcatctctatccatgagagatattggtctatagtttacctttcttcttatgtcttattatcctattaatgtccatgggatctgctatggttggaaggtgtcccccagactttatgttggaaacttaattttcagtgcaaaggtgttgagaggtagaacctttaagaggtaattaggtcatgagggttctgcccttgtgagtggattattattgtgggaatgggttacttatcacgggagtgggttcctgactagaggatgaatttggtcctgtcttgcacattctcaccctcaccctctcttgcctttctgcctttccccatgagatgacacagcacaaaggccctccataaatgccaatgctatgcttttggacttctcagcctccagaaacataagctaaatcaatttctgttcattaaaattacccagtttgtggtattctgttatagcaacgtaaagtggactaagatagaatcagcaacaatgctctcttttatttatgatattagtagcttttgtcttctctctttttttcctggttagcctggctggagattgtgcaattttattgatattttcaaagaaactgttattggttttattgcttttctctattgttgttctgatttcaattttttaaattatcatttctttcctttatgctgtatttaatttactcttctttttatttttatttatttatttatttatttatttatttatttatttttgagacagagtatcgctctgtcacccaggctggagtgcagtggtgtgatctctgctcactgcaagctccacctcccgggttcacaccattctcctgcctcagcctcccgagtagctgggactacaggcacctgccaccatgcccggctattttttttttttaatatttttagtagagacggggtttcaccgtgttagccaagatggtctcaatctcctgaccttgtgatccgcctgccttggcctcccaaagtgctgggattacaggcatgagccactgcacctggccttactcttctttttctagttacctatggtgaaggcttagattattgattttaaatatttcttctactctaaaatatgcattgaatgctatacattttcctctaaccactgttttcactgcatcccagaaattttaatagattgtatgaatattttcttaagttcaaattatgtttaaatttcttttgaaacctctttgacctatgtactgcttggacatttgtttaatttctaaatattttgggattttccagctataattttgttattgatttctagtttaattccactgtggtctgagagcatactttgtataatgttcattcttttaaatttgttaagatgcgtttgtgtcccagaatgttttctttcttggtgaaatgctcggtgagtttgaaaagaatgtgtgttctgccattgttagatgaagaagtctatataagtttattatatcaagttgattgatggtgctgtcagttcaactatctctactgattttctgcctgctgactctgtcagttactaagagaggggtgctaggtctccaaatataattgtggctttgtctgtttcttgtggttctattagtttttgtctgatatattttgatactctgttgttttgcacatacacattaagaatggtgtgttgttttagaaaatgttatcatcatataatgcccttccttatatgtgataatttttcttggcctaaattctgatttgcctaaaattaacaggtacttcagctttcttttgattagtgttagcatggtatatctttctgcatttccatagttttaatctagctttccctttatatttaaagtaggtatttcttatagacaacataagttgagtattggtctttgatccaccctaatagtctctgtcttttaattgtcatagctagaacactctcattttaagtaattatagatgtagttggattaatatctaacttactggtatttttaaaatttgttgctcttattctttgtttctttttgtcttccactcttttgtctgcctgctctggttttcactgagtgtttcctatagttccattttctctccactcttaatatatcaaatatacttcttaaaaaatttttaagtggctatcccagagtttgttacatacttttacaactaatccaagttcactttcaaataacactatactgtattgtgggtagtaaaagaaccttacacagaatattcccaattcctcccttccatctcttataacattgctgtaattcatttcccttatctattagttatactcactgaatatattgttgctattattattgttatctgttagaataattaagattgagaaaaataaaaattttattttacctttatttataatttcttcaaattgctacttttcttcatgtagaactgagtttctaatctatattatttttattctccccaaataattttttaaaacatttcttgcaaggcaggtttactaatgacaatttttttttcaatttttgtttgagagtctttatttcgccttcattttgaaggataatttcattggatatctaggttagtggttgttttctttcaacgaattacatatttccattcactctcctcctgcttgtatgacttctttttttttttcttttttttgacagagtctcactctctcactcaggctggagtgcagttgtgcaatcctgggctcactgcaacctccgcctcctagattcatgagattctcctgcctcagcctgcctagtggttggtattacaggcatgccccaatatgcctagtttttgtattgttagtaaagacgaggtttcaccatgttggccaggctgggcttaaactcctgacttcaagtgatctgcccaccttggcctcccaaagtgctgggattacaggcatgagccactgcacccaaccctgcttgcatgatttctaaaaagaagtctatgttattcttattgtttttttttttcttcaggtaagctgattttttattctctaaattctttttagattttctctgtcattgatattctgcagtttgaatataatataccttggtgcagtttttgatacttacctgcttaatgttttctgagcttcctggatctgaagttggtgtttgtaattaattttggaaatttctcaaccacttttacttcaaatactttgtttttctctctttattctccttgtggcattcccatgacgtgtatgctacattttagtaattgctctacagtacttggatattctgttctgtctttttcatccatttatttttttctgtgaatttcaattttggaagttcctattaacatgtacaaaagctcactgattctttccttggcggtaatcagtctacttatgagttctttaaaggcattcttcatttattacctttaaaaaaattctagcatttcctttgattatttcttagaattttcatctctatatttatattacccatctgctcttgcatgttttccaattttttctattagaacccttagcatatttatcatagttatttaaaatttccagtctgataatttcaaaaattctgccatatctgtcttgttctgatgcttcctttgcctcttcagactgttcttcttcttcttctttttttttttataacatgccttgtaattttttttttggttattgctgttgttgttattgaaagatgtatcaggtaaaaggaactgaaatagtatggttagggaacattgtgtaattttaatatttttaaattgattaaaattaaaattatgacccaggacatggtttgtcttgatgaatattccatgtaaatttgtaaagaatatgcattatgctggtggtgtgataaatgttctataaatgtccattagattcaattggttgatggtgttcagttcttctctctctttgctgattttcacttgttctatccataactgagaggaatatgttgaattatctaactataattttaaatttgtctatttgtcctatcacttctatccagttttgcttaatgcattttaaagctatattgttatgtgcatacatatttatgtttgtactgacttcttactgaatagacatttttgtcatttgtctctttttctatctggtaatttttcttgctctgattttctccttatctaatataaatataatcatttcaggttacttttaattagtgtctccatgatgcattgttttctgttcttttacttttaatcagcattatattttatctatctatctatcacctatctatctatctatctatctatctatctatctatctatcatctatctatctatcttatatataaaatcagccatatttatgtgagtttttgttgacagcatacagttgggtcttttaaaaaaggtcaatttagtgtagacagtgtctgtcttctaattgatatgttttgaccattcgtatttaatgtaatttattaaaaggtttagatgtaggcctaccttttatcatttgtttttagtttgtttcctaagtttttaaaaatgtgtgtgtgtgtgtgtgtgtgtgtgtgtgtagatagataatacatttttactgtggtaaaacacacaacataaagcttacaattttaattattttaagtgtacaattctttggcattgagtacattcacaatgttatacgaccttcaccactatttccagaacttttttatcatctcaaacagaaactctgcaatcattgaacaataacccccatttcttcctgcttccagttcccttgtaatcattattctactttctgtcactataaatttacctattctaggagcttcgtatacaaaaaattaggtaatatttgttattttgtgtcaggtttatttaacttactataatgttttgaaggttcccccttgttgtagtatgtatcaaattttcatttccttttgagattgaatgatattgcatatatacaccacattttgtttatttacttatctgctgatggccatttgggttgtttctacaaattggatattatacagaatggtgctatggaaattgatgtacatgcatttgtctgagtccttgctttcaattattttgagcatatacctagaagcagaattggtgaatgatgtggtaattctatgtttaaaaatttgaagaactgataactattttccacagaggcttcaccaatctacattcccaccaacaatgaatgagggcttcaatttctccacatccttgttattttgttattactcttattttttatgaatttgatcttgtatcccattgtggttttattctgcatttccctaatgaatagtgaacttgaatatcttttcatgtgcttactggtcatttgtatgtcttctctggataaatgtttgtttaagtcctttgcccattttttaattgggttgcttgttttctttttgctatagttgttgattttcagtaattttaaaaatatattctgactttttaatgattgccattctaactggtgtgagatggtatctcattgtggttttgatttgcatttctctgttggccagtgatggtgagcattttctcatgtgttttttggctgcataaatgtcttcttttgagaagtgtctgttcatgtcctttgcccactttttgatggggttgtttgtttttttcttgtaaatttgtttgagttcattgtagattctggatattagccctttgtcagatgagtaggttgcgaaaattttctcccattttgtaggttgcctgttcactctgatggtagtctcttttgctgtgcagaagctctttattctggagaggatgtggagaaataggaacacttttacactgttggtgggactgtaaattagttcaaccattgtggaagtcagtgtggcaattcctcagggatctagaactagaaataccatttgacccagccatcccattactgggtatacacccaaagggctataaatcatgctgctataaagacacatacacacgtatgtttattgcggcactattcacaatagcaaagacttggaaccaccccaaatgtccaacaatgatagactggattaagaaaatgtggcacatatacaccatggaatactatgcagccataaaaaatgatgagttcatgtcctttgtagggacatggatgaaattggaaatcatcattctcagtaaactatcgcaagaacaaaaaaccaaacactgcatattctcactcataggtgggaattgaacaatgagaacacatggacacaggaaggggaacatcacattctggggactgttgtggggtggcgggaggagggagggatagcattaggagatatacctaatgctaaatgacgagttaatgggtgcagcacaccagcatggcgcatgtatacatatgtaactaacctgcacattgtgcacatgtaccctaaaacttaaagtataataataataaaataaaataaaatatatatatatattctggatattaccattatccaatatgtaatttgaaaatattttcttcccactccatggatcattcttttactctgttcatagagttctttgatgtacaattgtaaaaattttgatagagacaaaattatttggcttttaaatttttgcctgagtccttggtgttatacccaataaatcattgccaaatgcaaggtcatgaagattttcccctatgcttttttctttctttttttaaagagttttatagttatagctcttttgtttattttgagtcaatttttatatgtggcataaggttggcatacagttttattcttttgcatgtggatagccagttttcccaccaacattagttgaaatgtttgtctttcccccattgaatggtctttgtatcctttttgaaaatcacttgttcttgtatgtaagggtttatttctggcaattcgattcattagtttatattatctgtctttatgtcagtaccacactgctttgattactgtagctttgtggcaaatttttgaatgaggaaatgtgagtcttctaccttgtttatttttcaagattatttttggctttttggggttctttgagtttccaaataaatttaagatagatttcctatttctgaaaagaaacttcattggtgttttataggaattatgttgtattgatatcttaacaatactaagtcttcaaatctataaacacaggatatctttccatttatttatgtcataatctctctcagaaatgttttgcaattttgtgagtacaagtcttttgctgcattggttaaatttaatcctaagtattttatttttgaatgttaacgtaaattttaattccttcttaatttcttttcaaaattcattgttaatgtatagaaacacaactgactttgtaactcacaaatatgttgactcttattagttctaacattgtttttaatggaatatttagggttttctatatgtaagatcatatcatccagaagcacagatgacaggtctttcttttccatttggatgtctgtatttctttttcttgaccatttcctctggttaggactttcaatcaattgttgaaattaagtcttgaagaccaacatccttatacaattttagtcttagaaaaatagttttcagtctttcaccattgaatctgatggtagctgtggcttttaatatatggcttatatcatactaaggaaatatccttctattgctaggtttttttagtgttttaataatgaaaggatcatcaatattgtcaatgctttttctacatcaatcgagatgatcatgtcttttttctttattctattaatattgtgtatcacttttgatttatatatattacattatcactggatatcagaaataaatctcacttagtcatggctttggcatctatctatctatctatctatctatctatctatctatctctatcatctatcaatcacctcatcttgtctatgttctaatgcacctccttatttctcttcttgttgtgggactttaatgacatgtgtattagaccttttggtacctttccacacatctctcaggctttgtttcttttttccccaattattttttatttttgttgttcagactaggtaagttttcccagtctttcagattcagtgactttcttctttcatctccatcaatagcagtattgatctcattcaatgaatttttttaaagtttaattgtatttttcagttgtacagtttttattttattcttttatatatcttacatttctgtgctaagaccttatagtttttcatttattttgaaagtgttttcccttatttcttggaacatagttataatcactgcttaaaatctttggtagttccaacactctgtcatctccaggttgttgtctatttgtcattttctttttctttgagtaatctagagaattttctgattctttatatgtcaagcaattttagaaggtatcttagacattttgagtattatactaaggggctctgggtcattttaatcttttgaataattatttattatttatttattgttactttgttttatttcagtaggcaatcaaccaattatgatgttcaggctgcaagcccacagtctgtgtgttgtggttccaatttaaattcagttttcagagtgcttacaagggtattcagatgtgttcttcatgtgtgtcacccagtgcccagtctgggacctgggagttattgtagttctcaatgccttaggtatgtttcttaaggccagattcatgtacacactgcttgggtataagaccaggagttcatacacaactttttagaatcacttccttgaacattgtcttttccactctgtcctaaatactcatttactcctaaagatttttcttcctggcctgattagtgtctctgctccactgttcacttcctgaaactgtgttatctccagggtcaagtggcaagatgatagagagaaaaaggcatgtggcttattcttatgcttttgggaccacagtttctcttgtaaaagagaagtgtttccctccttcatggctttaggcatgggaccagctcctgttgttgctctgccactgtaggattgcctagtagctagagtaggagagaataaaacacaaacaaaaatgcagagaattttccccactatctgacttgtagagttcccttttataattttttgatcaaaaataaagggcctatcttaagtatttttctgaccatgcctggtgcacagttgcaggttctgggctgccttcaagttcaggctgaacaaaacagagaaaggaaacaaacagagactcacttccattttggcagcattttggtatctgttttccttctctaatttgccttctacttaaaaaagattattcaattttattttatttaaaaacctatgatcactgctccatctagtctgtccaggattttagttgtagttggtgaggaggacagagctttctccatattaactaaaactagaaccctggcagctattcttatccccattttacagtcgagaaaactgattttctaaaattccattctgtttccttttgttttgtttctttctaaaatccaatagtactaaaagacagaactaacgttattctatctcatcccaatgctccttatctacctaccaactatcagttcaagaagtcaaaacctgatttgaagatgtggaacagagaccaaattacagatgccacaagctgacttagctcctgcctaagtgagttatgagagcaagatctcttgcctggaggtcgggaagcctatattctactttttttcttttttgcccaaatctttagtcaatcctggtcctatctcaggaaatgggttttatttgtaaaaaaaaaaaaatatatatatatatttagaaatatctctaacgattctccctctgctggcattccatgattagcagaaaatgtcatccagagtctcagtaaaggaagaaaccactggagactgagttatataggtatgatcccatgcaagataaatggggctcaagtagtactctgcttgatgtttaagcaagatttattaacacagggaaagagtagggtagtggcagacaaccctagctttgtggcttccagcagttctttttccttctggttacatcagcctcaaccattcctcccttacattctatatttgcatttttattaggctgtgccatcctcaagcttgggagtggacctgagattggcaagaaaatcagcatattttatcctcctcttcgccatagagatgggtgcagggatagccacatgacccacacctattcaatcagagccttttgttctggaaaaaaaaaaaaaaaaaagtgaaagaggagctcgatttccctgctctatttagtaagctggcaagtgcacagcaaatgctcttgatggtcatcttttccatatgagggaagagtttctgtagggtgaagccaatgtagaaggacttgaagccaaggagatggggacctacagagtcttaaagatgttgtttgagactctagattcagccacaccagaagccagctccatttagatttttccatttaggtacataataaattatctttgtgcttagaccagcatgaatcgaatttctttcactaaccctgatggatatcagggtgggctaaggagctaagtagtatggcactgggaagaagacaagaatgaacctagaattttgggggactgcagcagagatactgagaaccttatagcaggggtggtttggcaggagcaatgtgaaatgaagtctatgaatagattttttgccagatcttggactgtttgtttcagaaggccaagatgtttgaatttttttcttgaagacaaagactgaagaggtacctgagctgggctggtgcagcttcagcttttcagagaatgcaagttaatgtggcagcaaatcttttacagagaactgatcagagatcccccaaaagtaaggggtgagttagtcattgatatggtttgaatctgtgtctccacccaaatctcatgtcaaattgtaattcccagtagtggaggtggggcctggtggaaggtgattggatcaaggaggtggatttcttgtgaatggtttagtaccaatcccttggtgctgttctcatgatagcgagtgagctcttgcaagatctggtcgtttgaaagtggagcatctttcccctcactctctctctctcctgcttctgcttctgccatgtaagacgtgcctgtttccctttcaccttctgccatgattgtaagtttcctgagtcctccttggaagtcaagcagtttccagcatcatgcttcctgtacagcctgctgaactgtgagccaattaaacttcttttctttataaattacccagtctcaagtatttctttatagcaatgtgagaatggacttataccgtcattgattgctctagctctgctgttagcagtgccctaattgacaaaatcttgcaccaggtgttgcaacaatggcttcatctcaggcaatctggaaaaaaatcaacattttcacttgaaacctgtggagcccaaggacccaaattctagtcccacccaaatctcacccttactagttctgatcatcttgagataagtattaatttggtgttagtttcctcagcaatctctagtttgtgtttgttttaataataatgactgtcccatttagttggtgtggccctttgaatgtgaaatgaaatgatctctgtgaaaaggctttgggaacttggagagttaagccagtccaagggaaagtcactcgagagatgcttgaaattcttgagtcctgcgcactgtagattttctgctttcaaagagctttgcccctgctctacgtcatcctgaagtggaaagtggtttcaattccattaaatcgaagaaaaggcaattggagatcctaaattggtcatggctgccctgggaggtagtgagctccccaccacagggaggatttaagcatctaaataaatacctgttagaggggctatggagatttctctttcctttgtagaaagcgattcataacaggctctgttttgggtgctaaggtctggtctgtccggttcgttaattctcagcagggtgacttcccatttgtaacctgtgcaatatcattgtccctttaaagaaattcaaagtgtgctgtttcgcgacaggtttgctgttgttatttagtacttttttgaattttcaaaagcctgtctctccctctgcttttcaatactaccatctccagccttctggttcacaaaatccaaacacattgtcctgcataagtaataatgaagaaatctacaagaaaagatttgtggcatttgctaatcagtttaataatggaggatatttccaccacattatatggagacaaattaaaagggcaaggagagctcccagaaatcatctgttcgtgttaacaaagtgaatattaatgaaaaacaaaattgagttcctcttgagtctgattttcatcaaatcatacaggtattaaaaaatagctatagaaatcctatccattagtagttaattcaaaataactttggcctctgctctatttttgactattacccctctcatgggcagagaagccagtcaccttgctggacccaccgtgccatgaggatcaataatggagctaatttagttctttatggaccaaatatctagacagtggaaatgggaattaagttaatgatgcccatggatgggaagaggggcaagaggggcaccagggagcactttgcttgtttcctctggtaaccaggttcgggttgcccagatgaccaatgttctaaatcctacagaactcagacaccttgcagagaccaatatggcctttccaggagaggggtcatgcccaatggcttgtgtccaccttctgggcctctctctgcctttgccctgccctaagtggcccagcaggggtgcagctcaggatgaggaagggtctgaaatgccatgggctcacccagctatcaacagtgaggtgctggggagtgcctccaagaggggcccaacataactcactggagactgccactagtactcccctttgcgggtggacggaaggttaatggtgattcccatattataatattaggacacatttgagatttgtggggaaagaaaagggccgggagggaattaacagcttctggtgagaaagaggcaaggacccttggtgtgtacaggctctcaggccagctccaggacacttggagtctttagggagaagggaaggtgccaggaagaagaagggaaaatatgggtataagcaaaacacttgggaagaacctgaaggcaaacatggccagactgcatgtgtgtgctgagggctgaccactttatctacagtgtgactctcctacctcggcgatgtcgagaaaagctgtgttcactccagccagcttctattacttatcacatctgacatggccagaacctgggaggagctggctgtagcccctgaggtatggtcaggataccaggatacggctctctgaagctccttgctgcatcccatgtcctcagaagataccatcagagaatggtcctgtccaggaggaaatgtctctggaactctctctccaacaaaatagaaggccacagaatgccagcatcatgctgtgtttgtgtggaagtgatacaggctcctctccataggactcaagtgagtcccttgggctggactgggaccagaactagttcttggtccctcctccttgcttcaagtacctgggccagatggatggacataactactacttcctgacagccaccctaggctccgagctctctctgtggaccagtttcctgggctgactcatggtttttctgtttgcctgtaacataggacttacatgcttgccttgcacaggacttttgacttgagtcccagcttttaatagcttctgcctcagctccctccagtgttcggattctgtttctcaatagccaggaatagttaggaatgctttcagctgcaaggaaaagaaaaccaacaaagggttcagaaacacaggaggcttgttttactcatacagcaattattctggttacagatatttcagtgcatcaacaatgccatctgcacggtctgtttttctcctccgtcctcctcagctcattggttttattctcatgtttgcggccttgttgttgcaagatggctgctcaaccatcaggtgtcacatctacatttaacgcaggaaaaagagagagaagggcagtggcaattgccttttccatccatctggggatgtagcttttccatccatctggggaaacaaagactcccttgacagacaggcacctctctactggctaaggttgttggggaccaaccatgcagtggctggattttcctagagccagtccagttctggtatgtacaggacacttattgcaagaatatactgagtgtcaggccctatcttaggcttttgggggaaggaggggacagaggttaatggatggcaagctcattttcacggtagcctgggagaaactatggataagaatgctgcagacaacattgtcctcctcctgtcaaatgctgccaatccttaactagtgagggtgaatggtctgaccttagggcatgactaggttcaatgcccctgatgactactggtggggaagaggacagagatgcccaatactggacctggctgtgtcacttcaagtctgcctggtgtgaatgccccccgtcttcttccaactgtctgctatgcagggtgagaggtcggcccagccccctctctacccagacggccttgccagcccacatcttgcattcagacccggctctgagggcagcgggcaggcagtcaccaccctccagatgaccaattcaaaacacatggggacctttgcaagcccttggaagacatgctatttctctctgcctgcataattgttgagaaggaagccagagacggtgttctaattaattagagaaggtatttgaggatgccactgtgtgctggactcaggaccagaatccaaatgtcccacttatctgcctccaccactgcgaccctgagctgcccctctccttccctgcattcgtatttgtgtgtaaactgcagcttgtgaccgaagccttattagttggtcaaaattttacttttaaatggaccattaacctactcagaaaccaaagcacactggtaatgtaatacctcagcctcctgtcgggcctcagagtgaaccaggtcagaaacgacgtctatttctctccattatcccacagatatccggagcacgttctcacccacaggacttctcagtctggaaagacttttcccatgcagtttgttaatccaagctgtgccattgacttggacaagtcactttgctaccctaagcctctgagtccccatcaacaaaatggaactagctgttttattaaaaaaaataagtaaatctcgttgaccatcagggaggtgacaagtcacagagctgaaacgaaggtagcttggattccactccattctgggttgggaagttgggtgcttcccactgggcagttcttgaagctcccttctctgaaagtggggatgaagacatggataaaggtccttaagacataagagctccttccagtctcgtgggtcttctcggcagaacccttgcttggctggaattccatccactctctgcaaggcataacttcctgtttcctagggagaggggcttataaaaaggcataaaaatgaggcttctaaagacatcctggacgtcaactagatgttgcaaaattacattttgatgagttcagtgtaaatgaaccagaaacatatggattcaatttcccttggaatccacatgggtttaaaaaccaagggggcgggggagaatgcatttggggaagagcattttaggtctcaccaaaatccccgcatttgtaaacagcagtttgaggtttatgatgattgcgtcccgggctgggttcctttcctaataatagaatgtacaggatgtcttgcagcagcctcacaaaatgctttcagggaaaaatacccaaacgctgccctctccctgtgctcctgggttctatggaactctgcgatggcctcccagatttcctgccctgggtttgaccccataagtaccctctttgctccttctgcttctgcaaaaatagcatcccaatcaggtccacacaatcagtgactgtcaagtgccaggtttatcctagggatttcagcaagtgctacatttagtaaggtgggcagcaccacccctgctttaaaataagagaatcgaagtccaggacattcggcccaaggctgcttagctggtaggtgccagggttggcatgggaggccagggcttctgaactgaagtctggagatctttccaccataaaggatgcatttctattcctcagtttcagagaaggctaagaaaggtatctgtttatctggaactgctgtaaggtggtctaccaggaggctggaggaggggctaatgcagccattttcatggtggtcccagagaagtgcttggaattccccatggttccttggggagttccctgggagaaggaatagaaaagctgagagaaagaataaacttactgaacccccaggcccctgctcccatctagggaaacttgctctcctctgttctacctattgagctttcaaatatgtatttgattataggaagtttcacagtttaagtttcaaaatcatggatcctgaggatttttggtggccccccttttccctcctgccagtcaatgggttagtgttggcttcttgtctgcttttgtgctggggggttctgtacccactatcagatgggattgctggaactgtggatggacccacagagccctttgagggatgctttcgtgctcagtcctctgaccaggcaggaggcagaaatgcaggatgggaccctgcctccagcagacttgaaatctgattttgttgaaaagacaaaacccgcttccagaagtcaccttggaaagatgaccatgtgagataatgggcaggctggttctgggcatgggagactccagccctgtacagccatacactaatcaaacaatggcccaatagaaggcagttggatgggccagagctttggaggtagtgcttctgaatgacttggaccagagcacagaagggacagagacttcctggctctcagctgatggaaggagccacaagactccactgtattgggtctcccaggggaagagctgcctggccccgcctaggtacatcctgcaaagcacagccaggatggagatgggctggaggagccatctgattcttattaggctgtgcaactttctttattggcaaacagtctgtcagcagcttcttcctgcagagcggcccagatgtgcttacaaagcgttctgtgtccttcccgtccacacccagcccccgcgcgcattgccactttgccagacttcgtcctggtcccaggagtccagctgtggccaaagcaaggcttagtcaggagcctgaggaaagaggctcgcccctctgggtggcctcatgccagccacccctcgctccatgtgcatgggtctcattccccctcaaggtgcaggaggtgccctgggtggggttggggggggggcctggcctcactccttggggtgggggttggggtggggcagacagaaccctgccatgaacttatgtttgcacatgttcatcttcaacttgccatactactagggtggctttcatctgttattgggtctaaatctcctctctgagaattctcatgggagaaccacagaaaacaggagggctgctggcctctcatgggtgttcaataggagggctgacctcagaattcactcccatgattgtccaagtggcctccccatgtccctcttaagagagttcagtctcaagcatgtttctccccttgagaagctggaaaactggtgcaaaattgtgcctaagcataccacggcctgggggatattaaatgtttggaacaattaaagtcccattacatgaatgtccatggactgttttcctcccatcccacacatattgtctttctttaggtcacagaatcctgaatttcccttgggggaaccatgctcccttgactgtcataccctgtggtcatatgaaccaacgcattccctttctttacctatgttagtctcgcctgcctctcccaccacttatggccaaggctctagatggattcagggccccatacccaccattgacactggcctgccttttcctggtcattcttgtgtgtaagtaaccctaatgaagaaaaatgaagtgaggcgtgggtaattttccttcttgcatctcctgtgttcttccttaagtccttcaagtctacatgaagtttctcttcttttcttttttttttttttccggactgttctgatgatcataaatgaggatgcatacttcagccacaaacttacttcatgtctgatgttatcagccttagagatacccttgcctatgccttcttgcttagaggggaaacaggtctggaaagaagacaggagttctcagggtcatccagaaagcccacagccaaagaagactttcagaagctgcattggttgcaaagcatcaccttaccagcaaaggctattacctgctcagatgtcaccccagatctcaccaagccacccttcttggtccaaaagtgctctactgtgaatgtagtcttgtaggagtcttgatgatgaactcctcaccatccatcctctctgatttgataaaagtaaaccaattgtgaaaattaacctcagctcccaagacattcattggcatagaaagagaaataggtcttccttatggccagtgagacttaagtcagccaggagtggggcagaagataaggggcttctacaaaaggttcccttgctcctaaaaggagatataagagagaggcaaaccctttcttcttctggaccttattatttctacatgtgacttttgtacattgagagccagccatcttgagactcgaggaaagtgatcttgacaccaaaatctgggtgtgctgggaggacagaacggtgcgatgaaaggtccctgggcaatgaggactccctgagtgacaaaatcatcaaactccagagtcctggctgtttctggacttcttattttatgggatataaaagttcttattgtttgaaccagacagaatgggggtatcttcttctttggtactggagttgctctggtcagagtaagagaccatgtgccttagtcagcattacagggcatgggcatttacagcatgaattgccatctttattgacctttgtctctctctctgcctctttgctcttaatctatggcctgcctctcccccgtgtgatagctgttagagctgtgaggagccttaaaatcttcatctggttggggtagctgaagttcagagggaggaagggacttaggggcttgctcacgatgcatagaaagtgtggatccagcaggagaactcaggtctttcttgcccagctctaagctttctcatattgctcagctgtttgctgtcctgctctgtctgtctctctgtgtctcctccatacacctcctcaggtctccttctctttctgtctcctctgcccgagataaagggaccccttcacttagagctggatggggcagctctgctggggactaggggggtccgaaggagcctgtgctaaggaaacaagctggtgttgctggaaactatgtctagatggtcacagagcagcaggatggggcactgggattctgcgtgaatggccatcaggtggcgggacgcatggacggctcaccagccttgggaactggcagtgctgcatggcccagctcacggagaaggctcagctgtggctccttcctaagccatcctgcttcccactgacttggagagacagccggttggtgcggggtttgtgtgggtttatttactcttaataacaagcttatattttagatattccccctgggtatttctgctcatttgggcttcagtacaaaaccatgaatccacacacaaaatgtgtggatctgaaaattaggattacaccccagcatcccactaatagaggcagtcttcctttgaaggcgccagggatctctgtcctgccctggctggccaaaggaaagccacgatggggccatgcttgttaccagcgggttctggacgcatccaccaccatcagcatctgttctccccttgggtcttcattaattcagttaaggaaacatttaattagcaactgttgtggtcggatgcagcagtccatcctgggtagaagatacacaattccttactccaggagcttccatccatatgcggaagtgagaaggaagaatgtatgcacactggggcatgtaaagctctgccgtggagagtagagctggtgggtaaaggaggcctccaggatccatgtgaccctgcctgtggtcagaagactggttaagaaggcttcctcgaatgggttctcagctccaaactcacgcatgcctgcagtccagtttctaccggaaaagttgttcctactctcaacaattccacctgaagccctctcacctaacctccggcctgctcccaaccctccctgcacaaccaatgaaagctggcctcaagtaccaccaagaaaagcagaggccttgtaaggagtctcattttcttcccctaccaccagatggcgccccagcttggcctccgcactgatgggactctgagagaggaagcgtccctcttcatgtctaaggccaatccctccccatgcatcctcaatcccatctctctcttgttctcaaggccatggcctcattcggggtcccctctggcaccttgcagggtggatattctacccccttggaccatgcccatctacctacgaacaccttcactctccaccccaccctaatccagtttgcatctcgccacactgtcaaatattcatttggtgaatgtccccagtaacctccatgacgtccaccaatccaatagatgttttttgtgtgtttccttagatggaaatcctactcccaccttatgcacacgcacgttccctccctggctccatgttggttcaatccccctcttccactcaacctccaaatgttgagttcctaaaaactcagtcctacccacactctctctcaggtaagcccacccattatcccagttttaacataatgactgctcccaaatgtatagttttagtccagacctggcttgtgtatccaaccttgacttttcttatttcactctggctgtgtggcaatcctatcaagattaccacatccgaaactgaactcataactcataatccagccccaaccacccccatgtgactggtagaattctaagacatccccaaagtttctcactcctctcgtgcacatgccctgtatgatccctgggtctctgagtgccatggatcttcttttgatgattaggttatgctatacagcacagttgagtttaataaagggagattattcaggtgggactaacttaatccagtgagaactgtaaaagtagagagatttctccagttggtggcagaagagttcagaaaaactcaactcaaaggaggtttttagtgctgttgatgaggctccaggagtggcctctaggagctgagcatgatctgtggcctggagcggtaatcagattgagacttctgtcctacaaccacgagaagccgaactctgacaacaatagtgagcttcaaagagaactctccagatgacaaccacagcttggctgacaccctgatggaagctccatgagaccctgtgcccagagactgaccgatagaaaccgtgagctcatacatctgtgttgctttaagtcatgagatttgtgataaattgctttgcaacaatacaaattaacatatttccctatagcttttcatctcagtagacatcaccatcatccaccacattggttaagccagatatccttgagtttttcctttctcttactcccacatccaactcctcagcaagtcttccctcttctgttttaaaaactcgtcttgaacctctctatttctccccatcttagctgctcccatccttcctcagactctattacactttgccccatcactatagcaggtgttcacctccataccagggtgattcaatccattttccattcagcagccagaatgcttttctgaaaccatcaattgaatcatgttatctcctatttaaaatccatcagcaccttcctgctacatacacatcaggtgacatccaagcttctcactgcattctacaaagttcccaaggacctggcccctgcctgtgtctacaaactcatttcataccctctccctcttggcctggcaacaccagttatttccttcatagcacacatcacaagtgtaacttagcttatttaagtggtgtgtgtgtgtgtgtgggcgtgaatgggtaggtgtttatctttttctactagactgtagactccatgatggctgagatcatttctgtttgtgttaaccattatcatatacagggaaaccccttgcaacacgattttcctttggggctgaggtggaacaaaggctctttcccaggccgttgatgtgctttgtagaaagcaggagctccccgtgaagcacccaagtacaaagtgtactgatgggggccaaggaggggggtgggaaggggaacaggggtctcaagggttcgctgaccatgtgaggttagctagactggcctctggatccactggggtccgctaaagccctctcttccatgggggcagtctcagatttcctaccatgggccttgggcttctgtcccttggtcctttatttcaggtgccccacagaatggtgctgaatggtttgcagggatgtgcttctcttctgttcgcttaagacctcaaactgaaaaaatatgagggtgggcggtgactcactgttataatcccagcactttgggaggccgaggtgggcggatcatttgacgtcaagagtttgagaccagcctggccaaaatggtgaaacccattgtctattagaaatacaaaaattagttgggtgtgttgggacatccctgtactcccagcctgggaagctgaggcatgataatcacttgaacccaggaggcagaggttgcagtgagccgagattgtgccactgcactccagcctgggtgacagagcaagactctgtctgaaaagaaaaaaaaaaaggaaggaaggaaggaatgaaggaaatgaaatgaaaaatatgaaaatatccctctgccccaaagccgtcctactagaaccagtcatgacctaattcaataaaaccagcagctgggaaatgcagacctccactttatcctcacactgtctacactggcatccttctgccacaagggagattctgtgagcttttgtggacaaagctgggtctggacacccctggagatgagaagctatcctgggataaatttgaccctttgatagtggagagttgcaaagccactgatccactaggcttagctgctacactactggatgaagaaaatcgccttcatgagacacaagtacaggatgctttccttgcctggctgagggagggtctaccggaaaccccctacagactcctccaacccattgaatctccagtagttaaatgaaagcaccagacatttgcagctaagagactatgggtctctggagaagtgctggtcctctctgaacctcagtttctccactgtaaataggtttacctttcttcccccttgcccctgaccttggagacctattgcaaagatgaaataatatgcggaagtaaaaggcctggtacagagcttcatccccagcagctaagcagaggcttaaacgatggagtctatcatcattggtgatatcataaatgaactccttggcagcaccttgttctagagccacagctttgaaacctgctgaattgacagaaacagcaataaaaaattaaaagtcaaaaggctctggagtacatttcttaaagtatcaggctgtgtttttcccccttgtaagtttgctgagtctctggaggtcaccctgcaatgggccatcccttgggagtaggaaagcaagtttgaggccctaggggagaatagcttgggcccgggaaggggaggtcctggcctgccttgctccctgcagagcctggggacccatgtgcccagctgagggccctctagggggagaaaagcaggaggggaggaagagatatcagtgttttccaggccttgcagagagctgtggcattaaaggtctgaagaagcctgttggggaacttgcccagccctggtgaggctcacagaccaactctctggatttgaacatggcatcctgagctgtttctcctcatcctcagggcttctccaccggacagggctgcattcacgcagcccacaaaccaactgttctaagagctggtccaggaagtcttgtctctggcctgaggttcattcagggtccccatcgtctctcacattcaggctcaaaaaaggtgcagtggccaaacacgtgaatagtaacatacctgcttttgtgacacgcttgtccccttcttgggtggcaggtcccaaatgcagattgtttatgtagccagttgcagtgtaaaggctgtcatgagagacatgtaagaaatggagtgagagggttcagaagcattctatctgaaggggagagctctgtattaattagaagaaaaatattgattggttgtgtggcctcaagggcaaaaccccaaagacctgcagagaatcagagatggctgttaagctgctctaagtggtacaaggaaaatatctgtgcccccaagagcaaatgcagtgaatggaatgggatggatgttcaagacaaggtgctgcttgtaatgatccctcatcatgaccctgtgacttcagtaaatatgactaaactaataaaatgcctagtaagagtggagtggaggtggaaaccatacataaaatcatgtttcaactcaggtttgactcaaagagaaacaggaagctagcacaggtcagaggagagggtgagttcccggaagctcccacagttcatggaatgtgttttggactttcagagactgggaaaatgggggtagggtggaaatttgggtaaagggtagtcagatctacgagaagcagtgacatcccagggaatctcagggtttgatattattgcataataaagaatttaactggcctctgtccctggttctggggatacagactcaacatccttggaattttccaagtattaggagagtgcctttgttcttcatgagctcttggatctcactggagttcatgcccatgagataactcaggataggggctagtcagtcaccagaaaggcccatcatggtctttgagccagctggacctccagggaggggctggagattgagttcaatcacctggtcaatgatttaatccatgagacctgcattatgaaatcccaataaaaacttcggacattgaagctcagtggtgcttcctggctggtgaacacattgatatattaggagggtgatacatcccgattccatggggagtgggtctggaaactgtgtttgggactatgtaaggtatcactctatgtatctctttatttggctggtcctggtaatttatcctttgtaataaaacgtaatcataagcatagtgatttcctaagttctggaagtaattctagagagttattgaacctgaagggagttgtaggtctccttcagagttggtaccagttggtcagaagtgtgggtgctctgggacctctgaatttgcagcacgtatctaaataaagtgagggcggtcttatttagcctgtggagtctatactaactccaggcaattagtgtcagaattggactgtaacacaccagttaggtaataggaagtgagtctttcattatgtgagtccttctgcttcctcaaacctatttggtaaacactccaagtataattctgaataagaacaagcctttttgttccccacttgggtcctaggacctggcaaaatgcagccttgggtgtagctacattgttttgtagcctcattatgtcccttctccaaagacagggtggcatgagctcagggaggggctacttgttctggggcgggctggttctttggaagggcacaagcaaaccataaacaaagctccacctttgcaaaggcagcaccaggacttctgtttgggaggtccttgggatgacaaactggttctgagatgtcttcaagatgcttctgtataacaagcatatgtttttgactttgattgtatgtttatttaaggaggctcagggagggctgatggaagttatagggtggggacggctctgatccaacccaagcagctccttggcccaggcattttccctttggtgaggcatgcagtccctaaagaggtaagtgtcagagaaggcccagattataaatctttcccccagagcaatgcagtttcattgtacttaaaaataattaaacaaatctgtaaaacatgtttccattgcattagtttacttcacttggccccgcaatgtgaggatcataattacttaaatatttccctttactatttttcaaaacatttttctaaattgtcgaaaaacattctggagacagttggataaaaacatagtgaacatgtgtctgattaattttttaagacaatcgagatcaaatgcaaaaaatgattggaaatggtttcagagtgacaataaaagacagaaatctcagagcggggagtgcggtgactcataaggcagaaaggatttatcatttttactacagtatttatttgaacgcacatgacagggagcgagctggcctggtgtgcaaattgccaaaggtggagtgtggcccgaggaggctgtgtccagttagggccattcccccaagtgggctccaggaccaggctctctcctgatgccgagcttgtaaaacaagagatcactctcagcagccattctttgtctcctgtcattacaaacaactcgagggcaatccgctggcttctcgacaagcagatctgtccctcatctgtcagctgacaatcaggccaccatcccgaggccaccgctcgggctgccgggtgatggaaagccacttgtcaaaggagggttgatgatgtttacttacaagcacttcctaagcttgaactgaatttcatttgactttattcagtttattttgttgagtcctttttttaaaacttattttttaagttccaataaacaatagagatcacggaatgtgatttctttttctagcaaaacagtcctacccttctgccctccttctctagcatccattgtctgagaaatgtcacaaggggaagagaggccgggcctccctctgaattctttgcccttccaggggtgatacggtttggctgtgtccccatccaaatctcatcttgaattatagctctcataattcccacgtgttgtgggagggacccagagggagataattgagtcatgggggagttttcctccacactgttctcatggtagtgaataagtctcacgagatctgatggttttataaggggtttctgcttacacttggcttgcattctctcttacctgggtgccttgttggaagtgtcttttgtcttccaccatgattgtgaggcctcccagccatgtggaactgtgagtccattaaacctctttttctttataaattacccagtctcgggtatgtctttatcagcagcatgaaaacagactgacataaggaactccaagaaggttccaggcggggacactgcagccagatcatctatcagtttgaaggatacaacccctattttgctgaatgaatttgggtctccaagcatggaggtgcgtacgctagggctctaccctaaatcccaaactggaactcttttgaagggacctcaacatattgaaggtcatggccctatcaatcattctcatatccccatgacattttctttattttgtccttaagacaatttgtattattttttatagtgcagagactaatatgcctttttgtttgaaatggccagatataggaggttgttgtcccaggtttcacatcacagataagtatctttgtttcaactggaagaaaaggacaggcaatgggggccggtcttgcccgtgatgtcccaggccattcttggcacctggagttggtttgagtaggaccctaagtcctggattctgggagcctgggccctgtatcatttgctgagggcagttaggcatcgtctgctggaagttggggtgctctttggtggcccatgcacagaagggaattgtcaggctggagtgagataaagtgattgtccacctggtactcactggcccataatctatccctgggaagctgtgttcagggctggaaggtcagctttattccctggtcacccatgctcttactgcttctgaacataaggaacaaacagctcaccttggccggaggtataacatgttcatggaggtgaaccaaatagttagaattatatacaatcatggcttggccccttgatgttcattcaagtcaggtagagggtgctctaggagctcacaggtagtgggggatgaaaagtggatgtgggtgagagagggttgaacacacacacgccacactcaggtggtgggctgggccagtgagcaccttaggctggtgcctaaggaagatgtgggaggggctgaggcagggagtggcctgggaggatgatggcttcagggagagctcctgtccacactgcagggatatttgctgtgctgccctgagatttccaaaatctaacgctgaactttatcttacttctctcttctccaagacttgagtttctaagctttgaacattgtggtggtttggatgcattttgcagccataatttggtgaggatttcttgccaatctttgtaatcattggaggtcctggatcccgaagatttaagggtaggggcccagacctaccacccagagtgctgagtgcctgtggaagcaagaagcagagaagggggttggggcagggagctgcagcctcacgtgagacacctctgccctgctggctgcacccctcccttttgttgccaattctttacctactaaggtgcagccagatggaaagaaaccttgagtttaactcctttcttgagagtggcatcaatcatgtgccacctttgctagggaatccgagggcctcgtgaataattcagaaatgctacatagaatacttgttactcccaagtgttaatgaaaatatcaagggaattaattaacagtcaattatatcaattttagagttggacattgattctgatgctgagagctaaatctgaatttttgctacagttccttttcctaattctcaacttgtctttgtcatttctagtcaaacttataggggggaacatgtttgaattattttcattgccttgctgtatttcagcttacttctgataaataaagattaaaaaaagaactggtccagtattacatattttctacagctgtatgtgtacatgtagaggtgttatcttggtctttgtattaaactgcttgggggaaaagggagtttcaaactatggataatacattaccaacaaaagcgaaaaagcaaaaataacatgcatactatttgcatagaaatgtacatattttacccagaccatcacatggaagagctcacaagagatgagaagatggaaaaagaaaattgcaggtagtgttttcaccagttgttgatgacaatgggagcataggagtctgtccatcctgaatgtgtgacaagttttctaggcatttgttaaacttcacatatgaagagatttttcaacccctctctgatctttgatattaagaaaaagcatttcattgaaaacagtctttgcaggatttggcacgagtcgtctagactgctttatgaaaaatgacagctagtagaaaagtaattaaagatgtattttgctgaaagcaaaagtatttttggaatcaataccaactatctttaatttgccagttctttccacaatcattgtgtgttatctggaggatctcaattctagagaacggaggtgccagcccctttctggtcttgcttttacgtcctctgtctgcttcctcaccatcctcaagtaaggttagaggagggctgggcagggaagaagaggcatggtcactgtggtggagcaggagccagtggatctctcccaggaaagccagctgctcaacgagctcctcccagggcagcagagatgtttgaaaagtagcagcaatgaatccaggtgcagcaaaagaagcggttgttggtggtggtaactctggttttaagttggaaacaaaaggggaaggcagcttcatttatgcttttgagaagttttgaggcagaaagacagccctcctaactcttctcctctctttgttgttgttttgttttttttgagacagtcactctgtcacacaggctggggtgcaggggtacaatctcagctcactgcaacctctgcctcccaggttcagccgattctcctgcctcagcctcccaagtagcttcgattacaggcatgagccaccatgcctagataatttttgtatttttagtagagacagggtttcaccatgttgtccaggctggtctcatactcctgacctcaggtgatccacttgcctcagcctcccaaagtgatgggattacaggagtgagccactgcgcccggcctcttcacctctctttatgggaagcatttgccttagctggttgggagctccctgcaggtggtcagggctactcttcccatttctgtgcgagataccaggtaaaccacatgtactccatatgtgcttgggtgtggcttgattgatgatgacaagattaggctcccagcctgcagggtcccctttttggccctattctccccttctctccctcacatatcctttcttcacctgcctgacactcactcatctttcaggagtcagcttagatgacacttcctccaggaagccttcttggaatgcctcaccaccccagttgcatctcagaagatcagctctttttccacccaattccatcacgctgtatttggttaatggtctaacttccttagaatttctggggacaagggccagaattttctcaccaattttctccctttcctagtatggggccttgtactgtactccttgtgtttgagggagtcagaggcaggggctgaggacaacagacagcatattgtaactgcagtcatgtttctgccatgtgtttctctcaccctcttagcctacaggtctctgggtccatgggagtggtcccagggtttgaacagactggccttttccaggtctctctgtgttagaacatgaaggcctcttccctctcagcaccagagaaaagctggggtcaatgggcagtgagccctccaccactaggaggacactgggaacccggcactcgttaggactgatgggcaggtggattgaggaggtgaggtgactgagggactgaggatgcctgggtagcaccatggctttgtgacacttgaatctgccacagctgtggggccttcccaggccactcttcaggccatagagccctgcactggccaccttcccctccacaggccagggggtgaaccccaccggcatggtcgggggtctgtgtgctctgatcctggagttgtggggttcctctgggggaactcagagagcatcatactagaagtggaaggaggctgagcgcaggggctcatggctgtcatcccaacacttaggaaagctgaggggggagggtctctggaggccaggagtttgagaccagcctgtgcaacataacgaggccctgtctctattaattttttttaattagctgagcatggtggcatatgcctctagtccctgcaccttgggaggctgagataggaggattgcttgagcccaggagttcaaggctgcaatgagctatgattgtgctattgcactccagtggctgggcgtggtggctcacgcctgtcatcccagcactttgggaggccgaggcgggcggatcaccaggagtttgagaccagcttggacaacatggtgaaaccccgtctctactagaaaaatacaaaaattagctgggtgtggtggtgcacgtctgtagtcccagctactcgggaggctgaaggggaggatcttttgagcccaggaggtagagattgcagtgagccaagatcgcaccaatgcactccagccttggtgacaatgtgagacccttatcttttcttcttaaaaaaataagaaagaaaaagaagtggaagtcaagagcacctcacctggccctctgttccctcctagctagaacaagtctgcttctaccttctttgtttcaacaagagttcctgtgacacacacactatatatataattgtgaaatacataacatatatatgtgtacacacatcatgtggtgtatatgtgtgtatgtataagcacatgaacacatacaacaaactcccactcattgttttgcttgcgaccacgtctgtgcagcaaacacattgagtcttagcactaaagttgtgtcaacatactcaaagtcacatgtacagctgagctgaagggagggtgctgtcatctggcccaattttcaacgtctgggtgatgtggattttcattgctttggatcttaacgaggcattaatttttttccctcattgacatgcatagtcagacatagttaatctttgggacacttgctggtcagatgcctgggataagtatggattaagggaattctgattacccagagtgcaaggaaacttgggaattcaggcaacgagggggtgtttttgtaggtggcagagctgcccgtggcagagcaagttgtatccagaaaggattttgatcaatgaaagtttctgtgttggcagcatgtggggtttactgggaagatgggccccctgtgttcatgtttgcttttcaaacctgtctctatataggggtggaatctgaactcagccttcctgggactctaccttcggctctggttttatggccaggtgccacatctatggagcaatgctgctgcctccccatatgaaaatccttaatctactgaaaaacccagtcctggactagcctggatagagaggcagttctataaatcactatttatcacaaactttattgttagtgttccacagtggaatgtaaactccatgaaggtatgtcttaaaattatttgcaaatgaatggctcctcattgagaaggttagctctagacctcagccaggatgtgtgcctgtcaccaagtccttcctgcactcacagtgccctccacgttgtgccaggccctaggtggtctgagtggaacttgaccaaaaggaatctttcctccagtctggcctcagacaattcacccccactgtgtggggtaggatggatgctcttaggttttctgccatgatctgatgtcttagtagagctgtatgctcctggatttcagtcttgcctttcccagagacattctctgctgtcataaaagatccttcctttctctcacacacagcatcagtgatgctacttctacttgagggaggtgtggtgtcctctaacttcaattctaaagtcagcctgttgggcttggttaaaaaggtgctttagcccttcttggggagaatggagactctcattggagatccttgtgttggaggaggatgtgaaagtggattttaaagttaaatatatgtattactttgtaatctagcaaattgacttcttggcatatcttccttgtactttcttggatacgtgaaggcagatacaagaatatttattgcaacatttttgtaatagtgaaaaattgaaaacaatttacatgtccattaatataggaacaaataaaactgaatgcagccatactaaagaatcttatgcagcaattagaaagcatgagataaatctatatgtattaatatggatacgacttcaatggatatggcaagtgaaaaaaaagcatgctatggatagctacactggtttcatgaagtttatgttaagagaaataaagaataaataaatgattttgtattttctataagaatatatattttcatatatttgtaaatgattacaaaaggcctaagagtctacaccccaagtggattccagtagacactttttaggaaggagaaatagatttgcagaggtggacaacaggtatagactctgttgtttcatacatacatatatatatatatatatatatatagtaagtgtctgggtgcagtggctcacacctgtaatcccagcactttgggaggccgaggtgggcggatcaccatgagcttgagaccagcttggacaacatggtgaaaccccatctctactagaaaaatacaaaaattagctgagtgttgtggcgcacacctgtagtctcagctactcgggaggctgaaggggaggatcctttgagcccacaaggtagagattgcagtgagccaggattgcaccactgcactccagcctgggtgacaatgtgagaccctgtctcaaaaagaaaaaaaaaaaaagaagtgtatcttcttgagaaattcaacattctataagagttcaaagaattcaacctgtcttcaagtttactctacatacaaatctttgtcctgtcctccagaggactgaggctttaagtgacaatttgtgcagcatgagctgtgagtggatttgctgtgaaagagagagaagattaagacaagcctttgccttccaaagcaaaatgtttagagaaggaactaagacttatgccgaggaaatagggggcagagaatcccagagaggtgcagggcaggagggtaagggatccttctccccagcctggcccctggactcctctcactgctggttcaccagctccccaggatgggactcacctttgggctctctgtgcctgggagccactcccagtgatctcctcagaccacttcttccgttaaagcatggattagtctgtgatccctgggtccagaggatggaatggtgggttattgggaagggcaggagtttctgggaaggtttccaaaggggaggttgcacggagcctgtagggacatctttgttggagcaggtctgcattctgggggagaagcctggaacagtcagggatgtagtggcatgtgatttatggctaagacacacgccttgtctaccagccagtggttttgctttcaacagatcaaggtggccttgccacctaagcatttagcgaaaccctctttcttgtaccaaaagcctggctatggcccctctgctgctggagctggattggggtcagggcttcctgatatttgacttatagaaggttcaccaactcaaatgcactaggggacagataacagatgctggcaagtgccccttagagagaggtagagactggaataagcacacaccctctaaatacacacagccgaaaaattgcctaccattccatccaaaaatgcatgccatcgagccaaatttcccatgttgtgaatcctggttaaaggggagctagtgaagggcacagaatcaaggtttgtggagtgttggagttgattgctggtctcattactaagtgacactgacaagcacctaaccctcctcctcctgctgcacgagccttggttccacctgcaaaatgcagcaggaacacagctgagccacagggccgtggtgaatgattgtgaccaggtgatccagtgtggagcgtgccttgccctaagaaaggaattacactgtgctttgcttgaaaccaataaacacgcagtctttcatggcctcactcctcttacatcagctgaagccaactgctaactctctgcctcattttcacttcctaatgaagggaaatctaatatcagctttaggctggacgtggaaataacctagctcctccgatgtgaggagcgggtggaggagccgcggctcggctcctgcaatcctgctgcattgtctgccatcaccgctgggggcgtggtaggggaagaaatggtgcttagcctgtgtcctggtccccatgcagttgggagatggctggaaccccttccacctccttcagccgagacttctttgcaccatccaaaagggttaggactcccctcctcaccatgcggagaaaactttgggcggctgaccccaactctcctcacgcacagccaatctccttccaattctttcatcagcgttgggactgtcagctcaaacctgacaagtgacaagtctcgggctcatgctgactagataatcaaagtcttgtcagggctgtcaataccctgcagataggagaggacaaagggaggaaaggtttctacagaaaccgctgccttcacacaaacgctgtcgaagcctcttacccaaatcacctgtttgtccctaaacgtcatttactgctgaatctatgggctcaaaagcacaaaccctgaaaatgaaataatagcctgatattatacatagaaaatgcaaatttttctattttgtggacgattatcttgtaatataccatctaagaaatgcatacgtgtattttttggtaacaatcgcagtaacttggtggaagagattttttccagtaaaaaaaaaaatacataaaaaatctaaactgaaatatgccaattatgtagcatagacttacctgtgttgcatctttctggtaacacaagtaaatgaagtatgtattgcagcatctaatagatgcagtcgcacaggtgcataaatgtcctccaagaccccactttggtctcgctagcaaggatatgcaggttggtgagctaacagcctttacctgagagtggtggccccttgtccatcttcatccagacaccagcagagactgacataggccaaccagtctgtgaagaggaagaggatgtcagggtcttaaagccaagggctcagggagaacaggggttctggcatgagccccgtttcctctcctctcctctttccacacccaggtcagtgtctagccttcaccctcaaatcaaagcctgttgtctttgtaaaagggctcctgttcagtgatactaagccagcttccttccctggactggtggagcctccggtaaatgcaggtttaaacgtgagtgtgcagatgacatttcttggtagagagatggcccctggagaggagacttagagcccttcttgggcctgtgccttggcctgggtcagttcgtcctgggagcacttggtctggctgccctggcttaaccaggggagaatggtgggcccctgtcaaggcaactgctgagggaggctgaccccttttcactggaacaaaccaaccgcctctcctggcaccggagctcctgtgcaccagcctcccaccccctacctcacctccccctagcttttcctctccaaccactgtggttattccttttgtttcagacgatgcctatgtggacccacccaggatccctgcacttgctggtgcctctcttccctcctcctggcgaggtctcagcagggatgtctcttctcttctctggtcagctccttagcggtcccagcgtcccagagccaaggtacccctccctccctgccactctcattgatggccctttttgagcatcttggcaacactgacagctctctgcaatgttcttgctcctgagttcgcttccttgtttattacctccccttcgcagaggcacacaacgcaagtccagcggggcaggggccttgtccttttgctctttgtcccttgctgtttcccagcatcatggcagtgcctagaaggtggcggatgcggaaagatgacgcctctgcctgtggctggagttaggggctgaagacactgggaactcctgcctgtcggaggatgcacagggagcttctcaccccagggagggccacgggcatcttgtctgtgaagttggaactgagtttgtctccaggcctcagggacttctcatgcaatcttatctactgtgtgggccccaatcctcaccccaagggagcactgtgcatccttagtgctcattgctgcatctcccttcagatgctcctgggggagaggttcaggaaaaggtccagtacccatcacagcaggtatcatctgcttcttcacattgcccaccctgctccaaggcctgcgctaggtctggggcttatgaatagaaataaggctctatccctgccttccagcagcttatggtttagcgaaagagacaggcacataaacgtgtgagagattacagcgtggtcaggtagaaacaatgaggaagggctcacactcagcatggaatatcagggaagacttcctggaggaggtgacacttgacctggaattagatttcagaatgaaagctaaatagaaaatgggccaaaaccttcttggcacaacaataataatggagtgtgtctttgtgggtgccacacctgggttgcatctctcagaggctggtgaaatctgtaagcacctacactgcggtgggaaaggcttggttcttatgcaggaagtgtcacttctcagaccacagtgcttttgattcctgtggttctgcattcatcaggagcaggtgaggcaaagctctctgcttcagcccttcctgctcaaggccctgcctgagtcgctctttctctctggtacttctgcaaagttttttttgaaagctcctcttttcttcattgctctgtcctttcccagccagtactttaattcccccaaagctaaaactgactgtgtctctcccatctgcaccagcaattactctggccttgcttttatggtgctggggatggcaggatttcttcctgaaatatcgctcaccatccccaggcccatcaaattgcaggcggccatatttagaagggattcggagtgggaacaaggggtgtgcgtgagtgtggaagccaatattcccctgtctaatttatattttacatttctgtaaaatcatgcttagagtattttggtaatctctgcagagattaagtataatgctgtacatttaattgatataagtggtttcaattctccttaatatgacaaatctccagtgtgaaatattctttgttaatgatcaacataaaatagagttcatttttaatgtgagcacaagatttgaattaatttgtagctaaagcagggttattaaattttgtgtgcattctgtgcacaggcacacgttcggtcatacatgtggaccagggcatacatgcacgttatgggtaacgatgtgaggtgtgtgccccttctggtctgagctgaggctgtctatccttcctctctccctttgtcttagaagcagtacaagaaggggctgccccactggggtctctatctctgcaactccttggtctttggtacaaagggagcttcctggtgtcctgggttgtctggcctgagcctagaagcatggcaggtgtcctatcaaagctggacagagtctgcacaagccatagcaaggtcatctcctcctcccaactgtgtttctgacacagcatttactggtctgaaaattagcatattgctttacattataaaaaccatatgatggttaacatcatccaggagagttcaatgaaagttttgagttgaaaaagtttcttgcaaagtcatgtccagggagaaggccccggagcagaaccccagcagtgctgatcaaagccaagaggtttgcattccctaacctcagctgaattcagggcacatatgggcaagtgtgccttcccaagacgcctgagttagggagcatttacagaaagccagggccatgatctttggctctcagatccaaggtaagggcactctcaaaaaccacaactgcctccgtcagaggcgttcgaaccagtgcggctccatcttgaacaggggctgggtgaaatgaagctgagacctattgggctgcattcccaggaggttaggcattctatgtcacaggatgacatacgataggaggtcggcacaagatacaggtcatgaaggctttgctgataaactagcatgctgtaaagaaaccagccaaatctcactaaaactaagatggtgacgagagtgacctctggttgtcctcactgctcattatacactaattataatgcattagcatgctaagagacactcccaccagtgccatgacagtttacaaatgccatggcaacatcaggacgttaccctatatcgtctaaaaaggggaggaaccctcagttccaggaatcacccacccttttcctggaaaactcatgaataacccatgccttgtttagcaaataatcaagaaataactataagaatccttagtccagcagcctaagctgctgctctgcctatggagtagccattcttttattcctttgctttcttaataagcttactttcactttatggattcaccttgtattatttcttgcatgagatccaagagccctcccttggggtctgaattgggacccctttccagtaacacctcctctgctttgagataacagagggtaattttcctacaactgttaacagagaaaggggggaaataaaagcttcagggacaagtgccaaagtgaatttgaatatcgtataaaccgtgcctgggatgaggcagcaacttgcaggaaacatctgttccgactggaccctccgctcctccttgcagctggaacacagagctaagactccttaaacttttcctttgtgatgcaacccatggtggggagacagctttcaatatgcaagctgaccatgcagctcttcaatatttccagtttgtagccacctttttaatgatgatgggaactgaatcccaaaaacaatgagacctccccacgtgctcctagagacaaggcaggggtgcaggaggctgcacttaggcatgttaaatttctattggcttaagcagctgcagaaacaatctttaatcacgtatacaatattattggtgacaccgtgcaataaaagggctgaatgcttcatttttctagatttccttttatatttcaaaatcgcttttctttcaaattattgttatcttatacatttacttaaaaggaattacttatggcttcacttttttttttcttttgttggctgaccattccttttttaaattaccacctcacagggactgcagactttcaaacactttgcatatgaaatgaaaggcttgagtgtattatgttgcaatttttaagaatggcataattttaattagaaatgtatagatgaataaaaataatgctgctgcacgttactaattaggtattttattactctttgatttaaaaaagaagtatacctggttctaaggaggcagtgccatcagcttgtttgaagctcctggagaggaaaagggcatgaggaccggtggggtcatggtgaagggaggttgggggacctctcccgtgggaaaggttgggattgagaaggaaacatgtgcccaaaaaaagacaaatgaagagatactgctgagtgctgtgaaaatgatctctctttgaaatcagtcagcagcaaacactctaccattctgagcatctcacccctctgctaagctattatccaggtaatactatcctcactgaagcttttttccccttgaaatttatagataaataaataaggggctagctctatagcacctgctgtctgcttcaaaaggagtctgtcttttgtgtttaaagcagagacatgtatgatatgtgattgtcacctcagggcaatcatttttcccctggtttcctggttggctcaggtgagggtattctccccaagctcagctgtgagctctcagcaaggctggaaacctgtagctctgcgttaagtccctgaccctgcctgccatgctaccacgctccacctgagctgaagatagtatgattcagctgtggctttgtcagacgcatttgaaccagagcaactccatcttgtatagacactgggtaaaataaggctgagctactgggctgcattcccaggaggttagacattctaagtcacagaatgagataggaggttggcacaagatacaggtcacaaaaaccttgctgataaaacaggttgtgtaaagaagctggtcaaaacccaccaaaaccaagatggtgatgagagtgacctctggttgacctcactgctcattatatggtaattataatgcattagcatgctaagaggcactcccaccagcgccatgacagtttacaaatgccatggcaacgtcagaaagttaccctatacagtcaaaaaggggagggaccctcagttctgggaattgcccaccctttcctggaaaactcatgaataatccaccccttgtttagcatataatcaagaaggaacaataaatataagcagctgagcggcccatgctgctgctctgcctatggagtagccatgtttattcctttactttcttcataaacttgctttcactttactctatgatttgccttgaattctttcttgcacgagatccaagagccttctcttgggatttggatcaggacccctttcaggtaacagcttgatggttcagttagtgcttttggttgctgacatggtaaagctatggacctcccactggtaggaaggctcctctctgggatggtgggtgaacgtgagcagatcacggctgattctctacttcaactgcctttgcagccaggaggacccatggtgagaggccgtggctgtggtcaaggacctctgtgcccaagcaacaaggcacatttcctagactgagcaagagcagtctttgcgttggccctgccagatgtgtgtggtttgcatatggtcagggcagaccctccatcctgtaagaagcatagatttcttctaacttgcccagttctgagctatcacaatcactctcatctgtgtcgctgagctctgctcggcaagtgtggttcctcccaaagacatctcaccaggctgcaccaacgaatgctaagtccatatacttagcagcttcgggctaccaaccttgggttggtcttccctgagcccctgcatctggagccaggtgcactggaggaattatggggttaatagaggaacttccagagtgtggaacttctgcagaggggcatcttccaagaaaagcagagcggcttcccccattaggaatggtttgtggccaggaatctctgggctgtcacatccaattatgcagcctactaatcagcagagaacttgggaacatcctgactggggaagtcggcatctgttctaaatcttgccctcggagcaggagcagtgccaaataccacaaagactgcttagctgggtacaaaagatgctgtcaacaggccagaaatggaaagaagtcctgatttgatttgaatgaactattttttttaaatgggatagggaaaaaaaagtaattgaattacctccaataaaaataagctcccacattctttgagaaaaaaaaatatacacaagttgtgtctggttagaaatagagatattcactgctttggtttccagtataagtagcaaaattcatgacctcctcactcgggtaatagttttaaaaagctgtttctttgagactgcttggcaggtgatgtatatttccccaaacctaggctctaacctactttgtcaaacatgtcaatcatttcttctttcagcaatagctaaccaggggacatggcacactaagagtgacagttgcctgtgcatttctgtggtgtgaggttgctttgtgcctcagtgtggtccctagcagaggaatgaaccccttctccatcattggcctcacttttcctaactttggcttattattttggtcaatagacttttttttttttttttttgagacagagtctcactttgtcgcccaggctggagtgcagtggcatgatctcagctcactgcagcctccacctcctgggttcaagcaattctcctgtttcggcctcccgagtagctgggactacaggcatgcacccccacgcccagctaatttttgtgtttttagtaggggcagggtttcaccacattggtcaagctggtcttgacctcctgacctcaggtgatccacccgcttcggcactgggattacaggcatgagtcacgacgcccggccggtctgtggacatctaacaagaaaaacaaaaatttgttgaaagccttgacttgggttaaggctctgtgcagttgctggaagaccacattggcagagggtcatgatggagctcataggctacttgatgagataaaacattcctgtttgcaaactctcgtaacaatacaaaggacaaagggtggctgcatgggatggttcatcccaggaaagggatggaaattatgatctgcaaacgttcagagaaaggcagagttgggatggtcaggaaggtcttcagaaatgggatttgaagggtaggtagaatgtagcaagctgagaaggaagtgggcatggctatgaaggttgtgtgctgtgttcacccacaaggctccttgagaaggtattagttaaaaaatactctagttacatgatttccaacttttcagtaataatcacaataagcctgtagtaaagttctaatggcattggttcctggacctggttatatggccagcttcttggttcctattagcataaataagctgcacatatggagatgaggttgcatgacttgatgatttcagtcaataaaaaggcactggaatggactttctggtttcttgatttgtaaagaagggcgtggcatggaccaggggccatagcaatgatctccactctttatgcagggcacacacacggggtgagaagagctccagtgtcctgtcctaggcattggcaagccagaggcactggggagggctggcctgtctctggtcttccctggtttgcattgacatgttggttggctgctttcatatggggacatggagtctgatagctacattgcttctttaccccacatagggctttgggatcttttcagaagctactgcaagagactgggccatgggctgaccctccctagacttgaagacattgccctgcttttcagtctgtctctttctccctccttgctttgttgttctaagacctcttgttccaagaagttcacatcttttcacatctctgtcccaagcacccaacatacactggacagggggatttttttttaagaatttcaactcttattttagattcaggggtacaagtgtaagcttgttgacacggttatacacatgataccgaggcttggggtatgattgaaactgcgacctaggtagtgagcatgatgcccaataggtagttgtcaacccttgtcgccctccctcccccttccaatcactcccagtgtttattgttttcatctttatgtccttgtgtacccaatgtttagcgcccacttatgagtgagaacatgcagttctcataactgcatgcaggttttctgttcctgcattaattcacttaggataatggcctccagctgtgaccatgttgctgaaaacgatatgatttcattcctttttatgactgcatagtattccatggtgtgtatgcgccaccaaaagcctcatccaaaccataatgatttcaaaaagagaaagcaatgccggccccttccgataagaaggaatcagcacaagaactctggcaatgaaaaagatcagaatgttttcctacctctaaaggattgcacgagctccccagcagtggatcctacaaccagatttaaatgtctgaaaagtcaggcatagaattcagaatctggaaggcaaggaagttcagtgagattcaagagaaagttgaaattcaatccaaggaagccagaaaaaccacaaaggtcttatgtttctgagtggcagaaagagaggctgaccccaggttgcttctactttcagccctgcaactgtcccaatatagagaccactcaggagctgaaatacaaactcacatccagttaaacaattctcccatccatgtctgagtcacctccctggattttgtcctgtagttttatgtaccctgcgcttctctatgttctttatcaagcctgtcctccaggtaatcaattgatgcaatgagtgattagcaagctgctcttcacactagcatccacagacaccagtgtctcttcctggggccttctccctgaggaccaaagccaggaccttcttggaacacaccacttcccatgcagcctttcttggtgctgtctctgtgtttctcacaacccacagatcatggttttgggaaacagttattgagacatcatagattgccgtcactacttctggaaaattaggaccctactcctttgtttataaaatgaaaataaaatcctgttccatccatggccctgccactgagctacagcactctcattccctgctggtcaccatctctacctctggatcatgccatctctgtcattgtagacttcagctctttgttcagttatctccattacccagattcttcccaggactccatgtgaatttgggattctgtatgaatgctcagcgcaatgtatgatccttttatcacctcaataccctgcactacaatggccattttttccacccagcccttgactaccagtccttacagatgtaccgtccttatctctaactccagcctcttgatttcctaatgagcttgcttcattccttgggtcatcattgtggttggaccttagtgaggtttccagcccgctgagtcctgcctttctttctgtcattcttctccagagctctctcactccctcccccagctttgattctagagctcgtcatttaataatcttttttgtggtttgtctttaatgcctttggcccaggaaaggccctaataccagaagaacctcagtgttaatgtctcttgttcttataagcacagctgagtcttgctagagaaaaatcacaaaacaggacagagtggtggtcgaacaaatgttgcacagcaaaggcagcttcatttgggccccagctcttttccacagcctgttatatttgaacagtaaagtttagctactaccctatcacacaaattattcttgctgaggtgactcacagcctgttggataaatgacactaacatgtcagtccagccctttgccatctctcacagaagcccagtctgcggcagaattatctcaccaccctccagtccactatcggagtcctagagaatgttcaccagtgttttcctgtattttcaggcaaagtatttcaccttacagcaagtccagaggatggcagagattcacagtggcttctcttactgacctaacctgtcgctgagctctgtctataggaactgtgccagacagctcggttctcctgctcagtgatccctcctgctctcctgctgggtcctcgagtggacttgttctcttcttccctcttgaatttaggcatggctctttgattatgtctgacccctaggctgtggccagaacactattactcatgctggtccttgcagatccacccctcttgtgccatgacatgcactgcaacagactttgagatggagcccccatcagccagggtccctggagagtacgatgaaagagccccctgctaatgtgcataaatggggagtaagagcaagaaatatatttatcttattcttctatttcggttttttgttactgcagcataacttagcctaactcgacagatccagaagctgcaaaagttgacccttgaacggtgtcacaggtgtcaatcctatgacccattctgttgccaaagacccttagcgctccctactgcccactcctcccctggggtcccccttctcttatgtctctcttatagcctgagatgtcaatcattctctcctctgtctgccacgctgatgatggtctttgaggagggataacaaggatcagttgagagaagaaacagagcaaaattagggcttagagcccagctgtcaatcacagggatgtctggtgcaggagacagagagctgctgtgggcaccgtggcccctccagtgggggcccacaaggtgaagcaggactggagcagggagtgacgctgagaatgagtggcatcgcctctgggggagcttgcacacccctcccctcccagtgttccccctcccaccccccccgagtccttgaaaagggcttccgtggcctgtctccacccctgctcttatttgccatcctccaaagagaagctattagcctaggtaaacactccctctcccgagtgacttgatctctgtactccctgattcagttcctttgcaaggtaaataactataaatactaaaacatgtcaatagctttattaataaatgacttctggctatcttagagattctgtgctgtgggctttttcacgtattttatgtggcttaaccattgctggctgaaggatggctggaatctgtctagcacatcagaaatcacagtacttagactccccaaaatgttggccattcacggtgttaatgcttttttttcttggtataattttttttttcatttaatttggagctcacgtagcttataccccaatgtcaataccataaggcacagtgattcagtcatgcccatgcccatcttagcgttagaattttaaactttcgaaccctaacttctcatcagaatgaagcctaataaatcctcctcccaagagcattttcaaaaatcctgtgataaaatacacttatttctcatttgcagttaacttgaaataattttcatatttttttcccaaaactttatcctagtcatttttttcgggaattatcaagttttcttcaagaaaactgagaattgcaattcttaaaaccaagtcaattttctagataatgctttctgaaaatctaactcaatgtatctttttgtctttttgtctggttttgagtctcattttagaagaaggcctccaaggaacaagagtttcaaaattttccagaatgagattctctatttttcttgtggatttcccaagatccatatgcagccttggagcaaacactgtgagccccatggttttgacctgggcaggtgggtctgtcttcaatgctctgggcaagtctctggctacgcagagctccggttggaagtgcagagctctgacctgaactgcacattgtggatgttgtctgatctcagtagcaacactgacagcgttctcagacactcacatttctgtaggcaaagggaaactctttctccagtgtttcctctgaagacactaagctgcatcgatgttttctcttcttctttcccattatccagcaggttaccctcaacctcctcccaagaaaggagactgaatggagcacagagttgaccacgtcagactcacctgcgggtccttcagttactagctctgctctgtagtgactctccctagaaggctggcagggggcaggtgccatgagctgcctctgtctgggaggtaacagatctgacttatgccattaaaggacactctggtggatggacagataactgggaggcagtggcaagaggggaagcagagaagtcaatcaggaggctatggccatagcccaggtggaagatggtggtgccagacttagtgggatggtgaggaatttagagaggaggagaaggatgcattgattcaaggggaactttgatataaatggcatgaacttccttgcatagactaagtgtgggtgtgacggggaggtaggaattaggtgtgtcctgtaaacttttggcttgaccagcagggtacgtggtaatgttgagatggggaaaattgggcaagagataggtctgggtggaaataagtgttctagttggtcatgaaggatttgtgaagctgacagtgatatttgtagcagagaatccaaataggtagtcacctgcgacacctggggctcataagagagatcagatctagagatctagaggcactctcaaattgatgagattcaagtccttgaactggctgagagaatgacaagagggaatagaatgtgagtacagagttagcttgaagataatagttattcatttaaatattactgtagtcttttatttatttatttattttttagaaatggggtctcactgtattgcccaggctggtttcaaactcctgtcctggcttcaagtgatcctcctgctttgacctcccaaagcgaatagaattaccaacattttagtctttaattataggagacatggctcattttcaaaatattgatcaataaaatggagttccctttggaccaaccctaaattcctgtcctattttcatatttattcaccataaccagcattgcatatacctccttttggacctaaaatggagtacatacatttatatgaacatctagatatatttaaatagcatatttccatagagtactgtcttttattttcattaaatatgtatcttagagatcttcccatgtcaatacatatagatttaacttggtgttttagggtgtgctacttgatattttatagaaatatatatttaatagagatagggtcttactactttgaccaggctggtctcgaactcccgacctcaagcaattctcccatcttggcctctcaaagtgctaggattgcaggtgtgatccaccaccactggcctgttactccatagaattaatgtgctacagtttacctaacatttcccctactgatggacattcatattgtttctaatgttgcgctttgcattccaacatctagagtttgtgcggaggtcgtgtggagctcatgtggagatggagggccaccaaaggaccctgagatagacagtgtgactagagaggaggaggaggaaaaagaggaacatttacaattctggaagccaagagttgagagtattttggaaagaggaaggggtcgaatattttgaacacccacgaaaggttaaagaagtttaagatctagaagtatccattgaattggggaacatggaactcaatgttgacttgtcaagactggattaggaaaatgtggcacatatacaccatggaatactatgcagccataaaaaatgatgagttcatgtcctgtgtagggacatggatgaagctggaaaccatcattctcagcaaactatcgcaagaacaaaaaaccaaacactgcatgttctcactcataggtgggaattgaacaatgggaacacatgggaacacatttcctttatctttaccaaacatggacacaggaaggggaacatcacacacaggggcctgttgtggggtggggggaggggggagggatagcattaggaaatatacctaatgttaaatgacaagctaatgggtgcagcacaccaacatggtacatgtattcatatgtaactaacttgcatgttgtgcacatgtaccctaaaacttaaagtataataaaagaaaaaaaaaactaattcagtggacagtgagcatgagagccagacaagaaaggggtgcagagggaacaaagggggagacttggccaaggcagccctcttgggtgctacttagagaggtcgctgtgaacatgagctgggaaatgggagctagagctgcggaggaaatgggcttagggagattccccctttttttccttccttctttcccttcctccctccttccttctctccctccctctcttccttccctccctccttctttccctcccactccctgcctccttcctttcctccctccttttctcctctttcctctctacttccttccctctttctctccttccttctttccctcctttcttccttccctctctcactttcccctccctttcctccctctttccttccctctctcttttccttccctctttccttctctccctccctctcttcttccttccctctctccttccttcctttcttccctccttcctttcttccctccctccttccttccctctcttcctctctccttccttccctccctctctcctttcttccctttctctttttcttccctcccttctgcccttcctccttcttttcctccctccctccttccttctttcttcccttcctccctccttccttccctccttccctccctctttccttccccctccctctcttccctcttctctctctccttcctccctcccttattccttccttccctctctttctcttccttttcctccctccttccttccctccctcactcctttcttccctccctccctagtcccttgctttcctctctccctccttctttctctccctcttttgttcattccctctctccttccttccttctttcccttcctctctccctttcttccctctttccttccttccctccctccatccctcctttttattcctttctcccttcctttcctccctcccttccttttcttcctacctccctccatttcttctttcctccagttggcacatgtgtggcactgctgaagtcacacattctcagactctatttctgggtttcacattggaatgacagtaatgatgtctgtgagcacatagtaggcatggtataaataacgcttgagtaaaatcaggagcaaagtgcaccttttttgcagagttgtttcctaggaggaaaatgtgtgaagagcccttagaagaccatgggcacccaggcccactcagtccttgtcacttgtggccagtgactgtcacagaagaacaaagccttcagcaatgctccccgttcccaggcttgcctccttttggctcataaaccaaagtgaccgaggctttgggctggatgtagtgaaatgcacttggaggtgcctctggtcaaccggtcgaggagtggtggctcctccagctcctgtcccgttgtgtggtcaccgcctctccctccacctcatacaagtgtttcttcagcagctgcattagctccgtagagtcagcaacacgaatttttttttaaagtaaatttacttctgtagaaaagaaaaagaatgtggctattttggactttgatgagatgcactttgtatagctggaaatatgagtagaagttttcgtaatcaaaagcgaccaagcagaggctcctggccaggggatacgctgcaggaagtctgagcccaccttccagggaggtaacggtctctccacatccagggcagcagaggtgccgtggaaatagtgctccgtgccacttgctagatctgaccactgtgctgggctccagctgctcaaaacataaatcgtctttaaacacctggggcctgcctgcctcccgcagccatcttcgggccaatttgtcaatcctcgctcgttccatggtcctttttttgagccttgataatgcttctgaaagaagctggggacacttttgccattcatcaccaaagaacgcaacattctgtacatttattacagtatacattatgagcacactattaactaaaaaaaaaagcaaacccaaacctttcatttctctgaagttttcctttatctttaccaaacagataccgaatatgactgagaatttaataccctaaagtttaagacgggtttgtaaacatggtccctgctggctgctattgatcttttgctattttaatgcatttttactgaccgacatgtcctgtggtaaggaatattgcctaaattagttatctgattggttcttttgattaatgacgggcctgtgctccattacacatgacaacatgatcagaataatcactatcgctatccaagccaggcctggcattttttattccttcatttttaaagttcatttataaaattatttaatgtatacgtcctaagttgtaatttatttacatgacacttttttcgatgggaactgttgtactgtgtcacaaatggctaagaaaacaaggtaaactagatgtgcagatcaatgtctcttggctcaaggggaaaaaaacataatcaagattcaggagctgaccttgtaccaaagtccaacctgtcacagaacaaacactgagatacccaacaaatcaccaggcatggcaggacatgttctcctgcaatcccttctctccatcaccttctttctgcctggaacttctagcccttggacctctcaacttccttccttctgagtgtaaaataagacagtgcaaattcttcctggccctggctgcagcctgtgttcaccaagcgggcttcttgtgcatatgataatttggcaagaggccctatcagggatccagaatattcaaaatcagaatgtggaccacatctgaatgagaaaattgtgtgtgtattttaagcaatgacatgatattagttctggagaaatgaaaagatctgaatttagtctatccaatgattggataacaccactcctcagaggatctgctttaatgtaattatggtttggcttaatacaaacttggctgggtaataaaatgtaagttgtgagtaggtctggaatctttgaggcttctcaagaagatggctgtgttcaaaatttttctctcacccatgccctgctcaacttcgaaggaagatcaaggaagaaaagcttcagccctgctcctttttgagttctatcattttgtgaatttctagagtccagggtaataggctttttagggagccaacactgggcttccaagagccagctgtgcttttcctaaaaggccccacctctctgaggcaatttggcaaagcttctagccgcttctccattaaaaattattacttgagtaaaatcagacaagcctagggtcatgctagatgtattattatttcaaacaaaatttggttgcctccctatccttgtcttgctcttcctatctccccacacctgctctcacctgcagttgcctccatttcttctagaagagtccttgccatgtttctcaagctccattctgcccctaagacccaccccgccccccagcattggtctgactgcaggtaccagggaccctgggcactgcaatttcatgtcaacaaatggctcctaattcagtatctaacactgaacgagatgtatgaacggtatcagagcccaggaacatagaacctttccgttgatctcggagaatcctttgccatcctgttagcatgatgttgttagagactctagcatttcccggtggacacggtgggccctggccaggctgctgttgaacttcaacagaaagttcaacttcttgggtagaaggtcggatgggttgctggtgaccagtgaggtggtgtgccggagaccctacagagtggacagcacattttttcccacacacaatcctcaggggtgacctctgtctcttctcaggtcccagggagatggtctcacctccttctcaattcacatgagggaagctcctttcttaccaggtggagttgcagctctaagccctctgttttctatgatccttgtcaattcctggcacctttggcatgttaccatgttacaaaaaccaaacagacctaaagcaccctacgtttatgggttcagtcttttacactctacctgaacttcaaagtcaatagaagaacaacatgtgggtttccaagcgaaggcacttaaaatatagtgaagtggatttacatggtcttttttaccccctagacttaattaatgttgtaaataatacctcttatcttcttcataatgatttgctctgttatactattacaaaatttcattctgtcaattctcacagtcatttgcacagctcagacatgaaatagaactttggtgggacacctaccacaggaaacgcctgcaagtgtgtgcagagggtgcacgtgtatgtgtgcccttggacttgggaggcgttctggggtctaagataagcaagcaagtgagattatgttgaatatgcaagatatgttaatatgattaaatgactactggatcgcccaacataatcaattgaaatattcaccaactttgtgttgaaattggaagaaattattaccttgaggctgccaaacacattttgcagctttgaatttgcaataatgcgtgtctcacttaacatttaaaaacatatttttgactttaataaagtaagatgagtctattaaagagatattcaccagaatggaaggaagattcaaccagcagaggcgacaacgcagagaaagacacctgggcagtggtggggactgcttgtctcctcccttcctccctccctttctctgtccctctctctcttctttccttcttcagggacttgaggctgagttttccaaggggaagcatcctattccaagccattcttgttaatttatcattgcattatttgccttcactctcaaaatcctgcaaaatgatttagtctcttgatgtgatttacttgtgttttaaaactccatgcaacaccatcaagatcagagggatgtaaatgtgtcttctctctcactgaacaagcacagctaaaacaaatgaaatcaaagatgcatattcctttgccgtggctttgcaaaatgtaagtgatggaggaaggcagtagtcattcagctctgttctattattgacaacagcagacgtagaaattagaaaacaaatccccttttaaatgaaacgaagtaaaaggcctccctcactcagaggaaatactaattggagctaccttgctaatgctagcgagtcacaggaaggaaacattaagttattatttttaataatgcttacaagtctatccagccatttccagccagtgaaagatgtcagccttggccgaacgtggcagatctacttttcaccaaagatgctgctcgtcttccccctgatagcaatcattaattttattttttaacccagtcttcaaatgaagacagatgagctggagagttttaaatgcaggctgcttatgttcagaaaaatggctgtgagatgccagatcacggcatctaagctgaggccagttactgtttgggaagaaaagaaaaacaaatgtaagaggagtggcagagccaggcctcggaggggctgagagtgagagcagaaaagaaaagggtgcggggagcaggcctgtctcctggtctttgggtctgaccatttcataattgtgttggagagttacagatacaattatggttgattgatcttgataattttaacattacattttaatatttattttttattaacaaccttctcagtgtcagagatcaacatgcctattagatatcacatcattgatagcattgtgccatgtctttaagaaaaacgttttctttatccacgtaatttcatccaagccatatttttagtcgaatgtcaattagcctgatttgattgctatcattttatttttaagtcaaagattgtgacttgatctcactttaagctgctccagacagatttcaagtgacccttagcttagaggttgttaagagatctgcttacttgcattcagtagatcatctggttctcaaaggaaataggattaaaatgcatgtggctccatttggcaactggtttggggcaggcacaaggaagaagagaaaaaaggagaatattgttatgaaaagtgcttctagaatggtgaagtccggataactgcaaagctgtcccttcataaaagcagtgagaaaaatggcagaaagaaactgtcaaaatcaacattttcagaactctggaaattaatcagtggcctccaaccatctgaggagcatttattcaagataaatagctgagtcttggtgaggaataatgagcatgaagacatttgaatttgccgtttcctttgccctcttccccgttctgtggtggtctagggaaacatcagcctcacaacaatagtaggcatgaaaaccagcaatgtcatggccactcaaggggcagggagtatttgtagctcccctaaaaggtcccattcccaagagttcttagtatgttacccattgggcaaatccatagaaaagtcccattcactgggatggtctttggctcaaagatcccccagtgggaaaagctctatctccagggcatttgttgaagacaattagtggtctgacacagtaagaccagttggagcaaacaagaagctgttccaaaaacttcaaagaaaaatctagaaatgagatgactagaaaaggctttgaaaagatccagcaccttcctggggatctagaagacctgtcagagcttttgaatgcctcttgtatttagcatagtactgtgggttcttaccagggaaattaggtaagaaacaatacagaaaagacatccagattggaaagaagtaaagctgtttctatttacagatgacaagatcttgtatatagaaaaatccttaaatttttattctactaaaaaattgttagaactaatgaataagttcagtgaggctgtagaattcaaggtcaatatacaaaatctattgtatttttatgcaccattattgaacaatcaaaaaataaaataaaaaataaattgtatttacagtagaaacaaaaagaattaaaacatacttaggaataaaatgtaacaaataattgagacacttgtatactgcaaactataaaaccttgctgaaagaaattaaagacgagttaataaatggaaagacatcccatggtagtggataggaatgcattgaattaggcaatggttttaaaattgatctacagatttaatgccacatctaccaaaatcccagctgcctttttgcagaaactgacaagctgatcttgagacttacatgaaaatgctggagacctagaatagccaaaacattcttgaaaaagaagaaccaagttgaaggcttcatatttcccagtttcacaacataatacagagctacattaatcaatgcagtgtggtggtgacataaggacagacacataggtaagtgtaatagaattgaatgtcaagatataaatctttatatttactattcttggtcaatacatttttggcaatggtcccaaaacattcaatgaggaaagagtagtcttttcaagaaatggcactggggtaactaccatttgaggcatttgaacttgtcccatttctgtccccctgccccagttctgtagtagtctaggaaaacatcaacctcctaaccataataggtgtgaaaaccaacagtgtcacagccactcaaggagcaatgaggaaccacatgcagaaaaacgaagttggactcctacctcaaaccatatacaacacatagtcagaagtattcagaaatgtaagagttaaaattataaaactgttagaagaaaatataacagtaaatcatcatgactctagattaggcaatgatttcttgattatgaaaccaaaagcacaagcagcagaggaaaaaaatagataaattgaacttcatcttacttaaaaattttaaacaacactatcaagaaactgaaaatacagcccacagaatgggaaaacaaagcatttgcaaatcatgtaccttgtaagggtcttgtatccagactaggtaagtagccttaaacttaatgataaaaagatatccagtctattattgatttataatcctttgggtatatacccagaacttaagtataataaaaaaagataaataactcaattaaaaatgaccaaagtatttaaatagacattcctccaaaaaagatatacaaatgactaataagcatatgagaagctgctcaatatcatcagtcattaggaaaatgtaagtcaaaaccacagcaaggtaccacttcatgctcactaggatggctaaatttagagacagaaaataacaagtacttgcaaagctgcagagaaattaaaatcattatacattgctgatggtattataaatcgtttaacagttcttcaaaattgtaaatggaagttaccatatgactcaacatttctactccttggtatttatcaaagagaaatgaaaacagatttccacagaaaaacttatatgctaatactcatagtggtagccaaaatgtgaaaacaaccaaaatattcattaattaattaatggataaataaaatatatctacataatagaatgacaagaaaaaggaatgaaatactgatatatactatgattgggtgaaaatattttgctaaatcaaagcagccagtaacaaaagatcagttatagtataattttatttatatacaatgtccagaataggaaaatccatagagaaagattagcatttgccagaggttgaggtaggggtgtagggactactaatggctatagaatttcttttagggatgatgaaaaggttctaaaatgagatagtggtggtggttacatgactgtgagtatactaaaatccacttaattgtacactttaaaaaggtgaattttatgatatgtgaactatatctgtacaataaagctgttattaaatacctatgatgataaaagagaaaagaccatttcccaatttttttaatataattatcaactttggacagagtaaaacacctagaaaggatatgtttagtgtatccatgagggtcaagaaacccaacatttgatgctgttatcactgttcttgttatggtgtggggcatagttcactttcacagtgagtggggcagctcactaaagccggggctcccttgctcttctttgtctcctcccatgacaccctactccaggcacctgccataaagccttgaaaatataaggaccttaataagtaataggtgagtaaattggctaaccggtgaatgaatgcaaatcattaaagaggaatgtgaagtagtggtgttgatgatgatgatgatgatgataatggcgatgatgataataatgatgatggtgatgatgttgctgatcaaggtgatggtaagatgatgatgatgatggttatgatgatggtgatggtgatagtgataattaccatctttgtccctattaacaaatggtggtgatgataataatgatggtgatgatgatggtggtgatgatggtgatggtgatgatggtaatgatggtggtgatggtgatgatgatgatagtggtgatgaggatgacaatactgatgatgatgacagtgataagtagtagtagtatttctgtagaggctatcaagattagctttgaaagaactcttcagagataaattctaaaagccatttatgcaatggataaattgccaaaatcagtgttaaccttccaaagggttctactgtaaagctcagctctcgtacaaaagtctatggcttttaaaaatatttattaatacttttccagctgatatgtaaggcttagcaaagaggctgggcacggtggctcacacctgtaatcccagcactttgggaggccgaagacagtggatctcttgaggtcagaagttcgagaccagcctggtcaacgtggtgaaacctgtgtctactaaatatacaaaaattagccaggcatggtggtgggtgcctataatcctggctcctcgggaggctgaagcaggagaattgcttaaactcgggaggcagaggttgcagtgagccgagatcatgccactgcactccagcctgggtaacaagaacaaaacttcgtctcaaaataaataaataaataaataaataaataaataaataaataaataaaatttaaaaaagagttagcaaataaggtgaacacaaaaaagcgattttaaaaccatttttcaaattttactactctttgatatttatttgtgtcctttccttcccttaacattagtttttatattttagaggaaagaactcaggtgaagaccatagctggtcctcctgtgtcactgggttatgtctgtccttgactaccagcaaggcctcctgctattggttagatttctgatgtaccatactcttttgtcctgtcctctagtattttgggtcaagtgaagggaaagtcactgagtctgcttgttcccaaatgtctcacctcaaatcttctcctcattttctctctccacctgctttctcttcccccattgtctttttctgtaagtgagaagggtagaggggacacggagccagcccccttttcaaactcagaaaacaaggcttaccaacacacatagagaatattttttaaataaaagccagcatcaggatgggtggctgagaaagaggggtctacattagggagaagataatctttgtccctattaacattgtcagtggcagtaatttaataggattctgtgctatgtctgtaggaaattcctgatatttttcaggtatagaaatgattgcaatgacactaaatgttctttagtgtcactaaagttttgcctaccttcagtactacatcattagaagattcacctccttttcatctccgttgagtagacaagtgaccaaaatcccagcatagctatgactgtttcaatcattgaagaaaatttgctggccacgggacaaaattgcagtagaagtgactttatgtggtgatccaaaaatgagataactgtattcttctcattcctagcggaagtcaactctgcaggaagagacactgcttttgggaggcaaagttggcagttggttttctgatcttggtttgccattgaatcacctattccttgaggacaaaaaaagacttgtgtccaatgactggtcaagattcatcattccactggtccattttaaaggcttatctctcatgctatctatataactgactccaggaccatctccaccttttggaatatcctctgattacttcatttctttgtttgatttgcatttagtttttgtaagaagagcacttgatggggttattttcctcctgagcatctcacagtggtgttgctttcccagctctgtccatcattggtttgtgctcatggctctgtaatgtccctttgtcttttgcactttgcagagaagggtatggctggctctacctatgagtgcaccagggtagtaaggcaagcagaacaagaagctatttgcatctgttttctcatgaggtagctcagtccccatagttactattcctctttcctggccatttgctaccctaaggccagcaaatcttttaaacatgaaaatcttatcatgtcattctcctgatttaattcattaatggcttttcatttcctttaggacaaaactaaaaatccttagcctggacaattaggttcttcatgatcctggcctaggctagctctccagctccatctcaagtcatcactctccattgtctaggaatgctggcttccttcttctccaaagggagggagctcccttccatctctgagtgtctgagccttggcagtcgccattgcctcttccgctagcactctgtcctccaactcctcgcttggctcactgtccaggtctcagttaactgccactgcctcaggaaaattttctgtggcctcccacactgggtgccacagtaacacattgatcataaacctctgctttttcttcaaagtccttgtcaaaggtctagttaaatattaaataaatactaataaaaatatgttttcttaacataaatgtgaattccatgatgccagactatgtctcattcctaacagcatctctagcgctgggtacagtggtgttcaacaagcattttttgagtgaatgactgaataaatgtttttttctttgtccttctccataagctctaagaatcatttgtgctgggattgtgtcttaatattctcatctctatgcatggcatttttcccagagctgttggctgacgactggtcaaatccaagaccttgatctcattagcactatcctcccaccagctcccagtcgtcctagaagtgcttagaggtggaggcacagccagtgccaattccaagatttctcaaagaagtcttaggagggtaatactttcctcactgtatatttgctatatagagctagcgctacccagtgggacagtggcaaacccttttggttgcctaaccaacagctcttccccacttctttcctgttggcagggactatgtttatttgggtacccaggtctccagcatgatttttaattgggtgaaattatcccagctgcagaggaaaaccccaggtgatatgaataaatagttctcaaaatgtaatctgtagaataccagggatctcagggccctttcggggagcccttgatgtcaaaactattttcatgataatactaagaaatcatttgctttttttcatgttgacatttgctctgaaggtaaaaaagcaatggcgagtaaaatttctggtgccttggcaccgatcaaggcaggggcaccaaactatactaacagacatttcattcttaactgccatactcacagttaaaaagtttcagttttatttgagaatatctttgatgaaatagcaaaaactataattattattaaatcttgcctcttgagtacacgtcatttaattattctaagtgaagaatgagaagtacaaaaaaaatcatttctgctgcataccaaagtacaatgcatattgacatctcaaggaaaagcccttgggcaatggtttatgttgtaaactgaactagctggcttttatcacggaacactattttactttatagaatgtctgaccaattatggctattcagattatggtatttggcattttttttttcaaaaatgaagaaaggaaaatggttagtagtatttcttgccagtgatagaatttaagttttaaagcaaaattataatttttagaaaaaattgtatttgccactctgagctcaatagctctgcaacatcttaagaacttctgatgagatgggtgaatatattaacaaatatgatttttcaatattgtgtaacaagaaatgtcaataatgaaatatctgcataattcattgaaccaccgtattgccaaacaatcaatgcacggtgttacaaaaacatacctgggtaaaaattattttaaagagcaaggtcgatcaatagatatcaatgtaacagaatataaaagttctttgatatggcctcagattctacactgtatctaatctttgaaaagctaccccttgtaaagttttagtgtagtatcaaagaagaatgttcacaattgtccaaaagtattattaaaatattcctcctttttgcaactacatagctgtgtgaggccatattttttcatgtactttaaccatgcaacatattatagcatattggatgcaaaagaagttatgagaaatcagctgtctctattcaaccagacattaaagagagttacacaagtaaaaaagaatactagtcatctcatcatttttttcatgttggaacacatagttatttttaataactgcatgctctttgtattaatatatgataagtttattttttacaaataatttttttttaatttttttggttttaatttctaatggggtaaattggctgggtgtggttgttcatacctgtaatcctagcaatttgggaggccaaggcaggcagatcacctgaggtcaggagtttgtgaccagtctggccaacatggtgaaaccccatctgtactaaaaatacaaaaattagctgggcaaggtggcgtgtgcctgtaatcccagctactagggaggctgaagcaggagaatcactttaaccctgggaggtggaggttgcagtgagccgagatcatgccactgcactccagcctgggtgacagaaagagactccacctcaaaaaaaaaaaattctaatggggtaaacatatgtataaataatatataatacaaatatttattatataatatatataaatatataacaaatatatgtacttttattataggtttattatagatttagggagtacaagtgcagtttcgttacatgtgaatattgcgtagtggcgaagtctgggcttttagtgcagccatcactagtgtagccatcacccaaatagtatacatggtacccattaagtaatttctcattcctcacccctcttccaccctcctaccttctgagtatccaatgtctaccatttaatggagtaaatactgatagacataatttacataaacaaaagcttgataatatctggtcagggccaatcattgtggttctatttattaacggtgattgctttgggcataggcctgaaatgagacgtagtaaggagttctgctaggcggaaagtttacttttatagtgacacacgagaaagagatggtctcttttcgtccactagccatcactgggttggcatgtgacagctagaattgtggcagtcttcttatatgaccacaagctgacacaaagaaggtagtgaagtgaaagaatgaaagtaacgtgggacttggtcaacattgctgcactgcaggattaaccagccctggagccatcttgtccctagaagttttgttacttgtgataacagggttcccctattgcttaagctgttcgcgtacagtttcccttaatagccaagagcattctgatataggaatttgttcctaaactttaaacttataaagtaactcacaactagaataaagagtctttttttttcctttgacttttttcagtatggagctcacattcatatcagcctccaagatcattagtgctctatgcccaatctcttggttttatatattgcagttcatatgtgggtatatgggttttcctcctcctagcccttcccaccatccaaaccagcagaaaaataaatagccatataaaagaggtgaatgttatagacaacaaaaaactgccgggatctatgctgcacttcccccaaagagtcatttcagtctattaggcacataacgcatgttttaaaaaagaaccagttgtaaatacatatttgttcagatggactgcagcacaacagagagtctcccggggagagaggatgtattttacaacctgccaaaaaagatcctgcgaaaagtaaaataaggacaaacggaaaggtggagaacccctctgcccccagaaggctgatggaagcacagtccctccgcagtgttgttatggttggcctgacattctgatgcccggatctcagaggcagatctaagagccacttgtctccttgatgcctgagaaccattcagcccaaatgtgggattccaggaaggatgatggagtgagtattcaagtgaaagcagctccaggcaatgttcttgagccccaggagggggctaattcctctggtgaagctggaatgggctttttttggctgtgggggcatgaacagacgtgaagaacctcaactcatctggggttggttccagttgcctccatcaaacttaaagtagctcaggacctactttttgtgtgtgagtgaggtgtccttatgccagactactgtctattaccactgctttaaataatagctatagccaggacccctagcgccttacactggaacatgcctaggaagtggcattagctcaataattagtcccattcaggagagaaccttgtggcagaagcagtgtctagtgctgaatgtgagcccctcgaagtggggggaccttctcctatctttactttgtggatatactatgccccttcccttctgcattttgccaggattcatgagctttggggtataattggaatctccctaagagtaataacttagttaaagatgtacatttcctatggagtcaggaggaatgtgactgcagttggtcccattaagtgatgatgctaaggttgttcacctggtgaaagtggtgactgccaagtctctcccttgaggaggttccttctgctttttgtgatcagtgaatagtctgtgggttgatacttggacaccatgtaaatatcctgttccccaacgatcttttgactaatggtttttggaccttccgtaactgagtcaattattacatttttggttgcaatatggtgatttttctaattcagtcattacttctacagttattagcttatgttgataaggaactaagaatctatctccataaatttgtggattatttttctgtcagtatgctataatccattagcatcactattctttctgacattaagattgccttcagtttgaccagggagatctccttcagctttgagcacctccttattttctgttccaagatcagcttgtctattcctgcctcggactggaaatgagtcattgctccaaggatccttgtttccttccagtggggagtggcatttagaaaccacaatctgggtactggaagggctcattggtactggagggtcattgttcctaggacatttcggtcaaaagaactagaaaatgtaatgtttcttttttaaattaattaattaatttatttttttttgagatgaaatcttgctctgtcacccaggctggagtgcagtggtgctatcttggctcactgcaacctctacctcccgggttcaagtgattctcctgcctcagcctcctgagtagccagcattacaggtgcatgccaccacacctggctaatttttgtatttttagtagagatggggtttcaccatgttggccaggctggtgtcaaactcctgacctcaagtgatcagcctgcctcagcctcccaaagtgctaggattacaggtgccagccactgtgcctggccccattttatttctttctttagcaaaatcgggaattcataataagccctccagattacttctaataacataggcgttttccacacttcctctagtctatatttgtatctcctttctctcttaaggaaagttctagtttccaataacactaatatatttacttatttgctctgtgctacagtacatatacaataatttcagatttactaatcgttgatgccacaatcaacacaatcttgcaaactaaagtttaagacagctttgccttgtggtcagtagttgtcttaccaatatgttgaacgtaactccatccatgagtaaatatcaaaaaagtctagatttgataacgttgcaggggacaactggcttggattcttcaacagaatcaatattatggatgtaagaagaagaaaaaaggtaagggaaatggtataagtaacagaagacaaaagagacatggtgaccaattgcaatgtcaaatccttggttggatcatggggaaaaaaattccccaaaggacaaacagctcaatataatcatggattgtatattacataatattaatgttttgatactaaatgtgttgggtgtggtaatgggactgtgctataagttgcatttatggatgagggctgcatttggtgacaattctgagtcaacaataatgcttattgttttccttatcttccttttaaagacacaactcatgagaaattaaaacaaatacataacttcaagtttattgatagctgataggtacatacttttgatgttttatcttaaactacgtttaatctacttcttaacccattcactaattttattgactacattttatttctagagctttatcaatttgattctttttaaaacatctttatgttctattttcaaagtatcttgccttgcctccaccccaggagtttaattctttttaaagaatgtcttaagtgttgaagatcacttaaacaaatctactttatctattactctttaaattgacattccattatctcaactttgaggctctagtccacctattcattgtttccaaggatactcctttctaatctgtgctttctggtctgcttggtaatttttgattgagagttcattgccattgtcagtgtgtttttctttttttctcatgagaagcccaggtggacagtgttatgaagttattctcacagaggttttatgtccttggcttcttccattgtctagggccatcactagctcaaggcaaatcttatattaattttggagggcttagagttttctggatcctccagagattgaaaatttaaactccaaacagtcttaggctagggttttgaattctcaagcaagcatttagacccaaaccaatgagtaagctcctgtctcctttccccatgatggtccatagtttttgttttttttttttcacagagccttccttttaactgagagtgtagctttttaaggatcccgtcttcaagtagggattatggtccatctcctctccataccagcctaaggcctcatctttagtctctacatagcctttaaaactccagccctggggattgccccaaggaatactattatgggttgaattatgtccccttaaaattaaatatgtttcagtcctaaccccagtacctcaacaacataagatcaaaatgtgaccttatatggaaacagggtcttgccaaaggaaatcaagttgaaataagatcattagggtgggccttaatccaatatgactgatgtccttatagaaagaaaaaatttgggcacagagatagacatgcacagagggaggagaacttgaaaacacacagggagagtgtcatatgaagacagaggatggagtgatgtgtttacaagccgaagaatgccgaggctaggagaagctaggagacagttgaggcacggttctttccttgcaccttcagagggagcctggccctgcggactccttgtttcccacctcctgtcctctggacctgtgaggtgatacatttttgttgttttaagccccctggcatgtagtactttgctactgcagccctaagagatgaatacagaaaacaccctccccagttcctgcccctcactctgaaggcagccctgacatcagcacctcacaactcttacgtttagtttcctcttcacttccaacccacgaagattccttttttccaaccacagctttgcattgtcaatatttttggatagttgcatgctatgcagtgtttctctgcacttgtagtgggagaggtttcatgttatcttagccccccctcagctcacattatgaccttttgggcattaagaacccaagaaaaaatgagccaggcatttctagaataaaaaggcaatttcttcaagcacgccgccctctagggccatgctgagcctcgccaagggcagggcctggggcatgttgtgttgtgttggaagtgccatgaacacgaggctgacagaggccaggcaagtgacagaaatatgcaaagctggccaggtatataacaggccaactcttttgaacccctcaggcttcatgacatagcttttatttttctactttacctttctatttttaaataaatttattttatttattgttaagaggcagccttactctgtcatacaggctggagtgcagtggcatgaccatgcctcactgcagcctcgaactcttgggttcaagggatcctcccatctcagcctcccgagcagctgggactaaaggcatgcactaccatgcctggttaatttttcacattattattattttattagagagatagggtcttgttctgttgcccaggcttgtctggaactccaagactgatctatctgccttcacctccttatgtgctgggatgacaggcatgaaccaccacactcagcctgtttttctactttgatattctactgaatatcactttgtttaaaattctcatctaaggagaaccatcatgcaaacttaatgctaaatggcaactgcctccaagatctagagatactggtgaactcattgtgtctacctaaagggcagctgccactcagtacctgcagccattttgtgaaatattgtcagatctctatatctttcaaaataaaacaggaattcagatctttatgtgaaatctcctgatttgaaaatgttggcactaagaaaggattcaaaagttttaaaaaatgctttcaggcccaacaacatatattcacctactactgacttcaccagtttgctaaacacaatttgatgattgactctccaaaattactagctttataattttactgaaaagaaaactattctatgaagccatggtagaattttgcagttctctctaaacccctttgaaacaatttacacatttttctgtggcaaaaaaaaaacaaaacaaattttcaatggttgcacttttcttggttatttatttcttataatacagagaagtctttgattctaaaggcatgtgtttctttaaggaaaatgataaagaataaaattaattggaaacagccgttgcttgaccctcaagttctgaaaacagacggaacactcaaggtcaacattgaaactctgagtttaatttattctgttgtttttcttccttctccttccccagaacattccatattttgttagcttctgtcagagaaatatagcttcatttttatccacctctttgggcacaggtattagccaattgtgatgctgaagagaggtgtgattgccaagtccctgccgttggcacagtgaaggtggtgccttcataataccctcctttgcagtgaaagtctttttccttcagtattgagcagttgggtctctcagaacccaactgaggttgcccacagcctccatggatgatatgtaaaatctgctactttgtgaaacacctgtgtggatgctcagtgttggttacaggtatgtctttaaatacatgccttcttttctatgcccactgaccttctatgtagatatcctcaggacctgtgggcccctctctgactgtcaatctgtctactgtctcacaccatcattctcatgatgcagctggagtcattgatcatgaccttgtcaatcaatcaagtcaatcacaaccttgattaaaacctttgatgggctgggtgtggtggctcactcctgtaatcccagcactttgggaggccgaggttgagagttagagaccagcctgaccaacatggagaaaccccatctctactaaaaatacaaaattagccgggtgtggtggcacatgcctgtaaccccagctactcgggaggttgaggcaggaggatctcttgaacccgggaggctgaggttgcggtgagctgagattgtgccattgcactccagcctggggaacaagagcgaaactccgtctcaaaaacaaacaaataaacaacctttgatgactccattacataaataacaaagaccaaaacccacagcagagcactgaaaggcctttataatatgtcccttacctaattcaccaagctttcctcctggcatgatgcctccattcgtactgcattgagctcttttctgtctcccctgtcaaagtggcgtgttgaactgcatgcctgagttttgaagaagtacctttatgcacccaacagcatagctccacacatacaaagcaaaaagtaatagaaatagagggtgaaagtaataaatcctcaattatatttggagatatttccctgaactttctcggaactccataaactaaaaatacacagattaaaagaaaaatgagtagtgttatttaaaaaataaataatacaaaataaacttgactatatgttgagtgtatatgcacacacttactgaacaatagaaaacactattttctttttttttaagcttttattttaagctcgggggcacatgtgcagatttgttacataggtaaacttgtgtcatgggagtttgttgtacagattatttaatcacccaagtgttaagcctcgtacccattggttattcttcctgatcctctccctcctcccaccctccaccctccaatagggctaagtgtgtgctgttcctctctgtgggtccatatgttcttatcatttagctcccacttgtaagtgagaacatgcagtatttgattttctgttcctgcattagtttgccaaggataatggcctctagctccatcatgtttctgcagaggacatgatctcattcttttttatggctacatagtattccatgctgtataaggaccacattttctttatccagtctaccattgatggacattaaggttgatccgaagtctctgctattttgaacagtgctgcagtgaacatatgtgtgcatgtgtctttataatagaatgatttttattcttttggatatatacctagtaatgggattgctgggtcaaatgatatttctgtctttaggactttgaggaattgccacactctcttccacaatggttacactaatttacactcccagcagcagtgtataagcattcctttttcttcacaaactggccatcatctgttattttcaaacatgtgaaatacatacagaaatgatcatgcatttagccccaaaggaaatgtttataaattcttcaaatcagaaatcatgaagacagatcatgttaaaaatccagacttctaaaacaatccttgagttaaaagagatcaaaataaaataaattcacaacaaaaatgagagtcacccaaatattttaaaaaataaagctaatggtaacaataaaaaacttaagtaaatatactggaaaagagaaatgggtgcaattaaattaacatgcaactcaagaagacagaaaaggaacaatattataaacccaaagaaagtaggacatggttaatgataataacaaatctgaaattaatgcagtaaaacaatagctttaatacctgattctttgaaaagacaaaaatatcagatctatatggtcaagaagaaatagtatatacataagataaatgatattcaaaatgaggaggataatataacttcagataatgaggagattataaaattaagtgggcattattacattctaaaatatagtcacaatcaaagtatttctaataaatacaaattaccaagattgaatcaaatggatgaccagaaaagcccaaaatttctgaaagaaatttgtaaaaatagtgaaaataatttcttaaaaattgcatcagacctagagtatttgcagataaactgtaccaaaccttaaaaacaaacaaacaaacaaacaaacaaacaaacaaacagaaaatcctatattccagggcctggaaaaccatggaaaccttcccaacttattttacaatggtgatatttcccttccctatttctcttctacaagagtagaataaatttttaaattatatgtatgagcatagatacagaaactcaaaataaaacatattcattttgctttttacttagttgagtttattttaagaataaaaggatagttaacctgatgaaatatactagtatcagtaacaaaattcacaatttaaaatagaaatcctggtcaggagaggtggctcacacctctaatcccagcattttgggagaccaaggtgggtggatcacctgaggtcaggagttcacgacaagactggccaacatggtgaaaccccgtctctactaaaaatacaaaaatttgccaggtgaagtggtgcatgcctgtaatcccagctactcgggaggctgagcaggagaatctcttgaatccaggaggcagaggtttcagcaagccaagatcgcaccaccacactccatcctgggaagagagcaaggctttgtttcaaataaaaaagaaaagaaaagaaatcctatgtaaagatgcactaaataaaattaatctctcatttgtgaaagtcacagtaagctaagaaaagaagaaaacttaacccaataaaaagtttgagaaatccaaattcatgctgcaaaatttaaaaaaaaaatgttttatttgaagtctagaaactaaacaagatgcttattgaaatcccagccactgaatatggaaatagaattatataagtggataaataaaactaccaccatttttagctgatatgttttcataactatcaaatctaagtaaattccttggaaatatatttgaaggcaattggatacaagataaacatacaaaaatagtttttctaaacaacaacaaaaacaacaattagaaaatacattatgaacatatcccatttaatagcaacaaaaaacatacagcatctagaaatatagctaacagaaaacatgcaagacttgtaacaataaaactataaaagtttataaaggacttaaaggagactagttaactgaatagtagttagagatgagaaggctcaataagcaaagatgtcagacctttcaaaattaatttttcattcagttagctgatgctcttctctcttgggctggagactgctttcccaggaagcaaaatctgcaaccaagacttgcctgcaggtaggttatttttaggaaatgttccaacagtgcctggagtaaaagggatggaaggctaaggaataagagtgtctggtataattgccaaccgcatctcagtaagaggtttttaaaagaaacacaagaagctgattctagaatcatttcaaagaaagattggagaagaatcatgaagatttttcaaaaaggagacaagtgtccaggcgcagtggctcactcctgtaatcccagcactttggaaggctgaggcgggcggatcacgaggtcaggagattaagaccatcctggctaacacggtgaaaccctgtctctaccaaaaatacaaaaaaataaaaaaaaattagccgggcgtggtggcgggtgcctgtagtcccagctactcgggaggctgaggcaggagaatggtgggtgaacccaggaggcggagcttgcagtgagccgagatcgcaccactgcactccagcctgggtgacagagcgagactccatctcaaaaaaaaaaaaaaaaaaggagacaagtaagttaggaggactaatttccccatcaaaattccacacttaatctaagggtataaacattaaaaccatgagtattaaggaagaaaaaaaaatcaatggaacagactaaagagggaagaaatagaattatgtaattgaaagtttagtttataacaaaggtggcaaagaatgagccagttaactaatgatgaggacgactcattgttcatttggaaaattagacctccatttcataatatgcaaagtttcaccttgcattaaaaagttcataaaagttatcaaaacaatcttttgatgtaaaacatattctgcaataagatatgaatcccagagtatctgaaggaataaactgacatatttgactacattaaaacaaacaaaaatctgaacgaaaaccaaatgatggattgggagaaatatgtataacataaataataaaacattaattactattcataatttctaaaacactcctaaaactcagtaagaaaattaaataattccatggaaagatagacaacgaaaatgattaggccattcagggaacagaaaatacaaatagccaacacctacattttaaacattgaatctttcagaatatcagagaaatccaaatttaaacaagattgcccctttgtatacattagaacagtaaaattttaaaagtctggtaagtcctgagcaggctggaatacaagagaatataccatgttatctaccactcaggaaatgtcaattagcccttttagcagaaagagcctgcatttaaaatgtacacagctttcaagaaagcagttttaattttagaagtctaatctacagaaacactttcaggattgttcaaagatttatacacaagactgcacaccaaagccttatttgtaataatgaaaaatattacgagcaccttaaatatttcataagttatggtatgtccatgctatggaatactaagcagctgttaaagagaataacgggtattgttttgaaagatctttgaaatacattaagtaaaaaaaattcagggtatatgataatatgtataataatgtattctcatttatgtggaaatccaattatatagttatatacacatatttatagaaatgagtagaaaaaatgactgcaaaggtgcgcatctgattgttttacagtgcttacatctgaaagaggggcatggaggtagggttaaaaatatatttgggggttttcacatttattctgtgtatttcagtgatgtttaaattttttaccattttatgatgatgtattactgaggttaaattttttaaaaaagatatgcaatgttattactaaatattagttattcctatctttattaaatcaatgctgaacaaatatttcaacacatcagtttgaagcggcccatgatcagtgacttgtggagggcacctgcaggtctccatctgctcacactggggtgcctccaggtgggataggctaaaggtatgtggccaggccaatgggccggagccctgtggagacatataagaccctgataggcacgtagtaacacaagctcgcaggacatacatagcaccccatgtaggggaatacaggcaagcaccatagtgaaaaacagctttttgctggctcaggacaagcgaagcttccaggggtctcatgtgaaggaagtgccccggctcaccaccaagccccttggggtggctgtgcccgacctccctgtaaacacagtatgggtgagaccttcagtgctcctgacagcatgaccccaggggctagctgggagctgcatggcaggagtagagggaccaaagacagcactcggaccagcatcctggacgaacctcctgcttcatgtggatccagagccttgaaccctgtaccatccacagggcctccagcatgcaggctgacaatggctgggtgcctgtgggcattttgggaatccctgtgtcattaaaggagctgggagacaactgctctacagagcattgagaagcatatttcattttccaaatgctttaaacatcacccctccgttttgcaggcacgccgaaccaccgtgtccctgtgtgggtccttgagtgctggatagtgtcagggacctcggatgtcttgccctctcattttctttggcaacttggcaacccaaacagtcacatctactgatgagctcatccaatagaatgaataaacccttatttctgaccttagcacatatctgaatcgtcctccaattttaccctccccataatgggcctttctatttgttttctcagtgtgaaaagagatataacttgctacaaagaagcttcctgcaaaagctcactagtaaggcatgtatgcatctctagagtctccagatggtcctggatgtgtgaattctgcccattgctggccgtgaacattcaagggtacggcatgatgtcacagctgagtcacaggccgaggagttcttgagaccagagctgcattccaccctgccacttgcagactctgtagcttatgcaaattacttagcgtttctgaaaatggggatactaatttcgactctgcgtggttggtgttcagatgacagacaatgtgcaggaggtgccagcattacctggccctttaagacgctatagattacgtctattatactattatccccaggactgccacttgcaccactgggcctctttccatagggcaggtcaaggccctggtgaggaagaccagagcaatctaagaaagcatgaatttttcctctgagagacatagaaatgaacttctaaaagtggaaaaaatgtttcggtccacggcactatcccaggctctttggaactccaacagaccagctcacaaacaaaaaaaaaccctaatatgaaccaggtactgtagctcgtacctacaatcccagcactttgagaggccaaggcgggaggattgctggagctcaggagtttgagaccagcctgggcaacacagtgagaccctatctctacaaaaattgcaaaaattagccaagcgtggcggtgcatgtctgtggtcccagctactccggaggctgaggtgggaggatcgcttgggcctgggagacagaggttgcagtgagtcgtgattgtgccactgtactccagcctgggtgacagagtgagactctgtttcaaaacaacagcaacaacagcaaaaccctcattcattagaactgttttctcatattagtattattcatgtaatgttcttttgaaaataaacatttttttaggccgggcaaggtggctcatgcctgtaatcccaacactttgggaggctgaggcagggggattacctgaggtcaggtgttggagaccagtctggccaacatggtgaaactctgtctctactaaaaatccaaaaaattggctgggtgtggtggtgggtgcctgtaatcccagcttctcgggaggctaaggtaggagaatcacttgaacctgggaggcagaggttgcagtgaggcaagatcatgccccattgcactcctaaaatgtgttttcttttgggagaggaggagagagtataatgttgccttgaggataaggcaattctctcactattgcgtttctctgaccctatacggagaggcaatgaggacatgcagttcagtggtgaggagtgtatctcagggcaagcctcttgtgtggggggttgggaagttatgaggctttcctaagtcttatggaagaaattgtgatcgttgtttcatttctttgattttacagaattgttaccattttttcccctacggtatcttttgagggtgggagcagattcaatgaactcgacttacatcacgtttctgtttagtgatccgaatatgaagcaatcattcttctctgattatctgagtctttccaacccttaacaattctatggcccctctctgatgtctcctcccacaactattaaatattcctccttcctctgacttagagaagatttcctgtatttaaggtccatttggtaggtgtggtcctagtaaggagcgttttgagtacagaaaatgcaacactccccaagcttgcttaagcaagacaggggttacctgggggtctatagagttattttccaggggacatgggtaggaaatgcccccgggaagcagggggcctggaaacaggaattgagatgttccagtcaggaaatacagccacctgtgctgaggccagctggtcttgttttctgacctctcgctacacatctgtattccttgtctccgtctgtttctgtctctgtctcttcctccttctctctctctctctcttttttgggtggggggatggggggatggaattttgctgtcttccaggctggaatgcaatggtgcaatctcagctcgctgcaacctctatctccctggttcaagtgattctcctgcctcagcctccggagtagctgggattacgggcatctgccaccacacccagctactttttatatttttaatagagacaagtttcaccatgttggccaggctcctctcaaactcctgacctcgggtgatctggctgcttcggcctcccaaagtgctgggattacaggcataagccaccatgcctggccatccctcttatcttaccctcttctgccttcccaagacccagtccagcctagaccctacttacctttacaactaataggcacagagacttgactgggccattctgtgctttacttccaaatccccaagaaaaggaatctaaatcatctaacctgtcctttgggttgatccttactgagccagggaagctgcctaatctatctgtctaatcaacagccacaaggagggaaggtgcagttctttttctctgactaataaaagttccttgagggccggaaccagtattcccacgtggcctaacacccagtaggtactctgtaaaattgattgattggttgattgattatataccatacaacaggcttgaaaactcctacagtgtgagcatagctttcaaattgtcacttgtcccttctaataatgaatgtcagatgatccaagctgaacagagtgttggattcgtttattttactttctgtagaccttctgggtgaagggcaggctcataaaacatgtgtataagatggaaaacttggggtacttgcagcgatgaaatgtaaagcataatttaacattacatatagcattgaggctcttggtaggatgtgatgggtgcccagctgctgtatgttttgatgtcgttggaattgcgggtcctgtaaggcagcagtccccagcatttttggcaccaggtaccggtttggtggaagataatttctccactgactgggtagggggtggatggcttcaggatgattcaagtgcattacatttattgtgcactttatttctattattattacattataatatataatgaaataattatataactcaccattatgtagaatcagtgggatccctgagcttctctgcctgcaactagatggtcccatctcggggtgatgggagacagtgacagatcatcaggcattagattctcataaggagcgcacaacctagatccctcacatgcgcagttcacaataggcttcgtgctcctatgagaatccaatgcagcggctgatctgacaggaggcagggctcaggcggtgatgcgggcgatggggaaagcctgtaaatacagaaacttcactcgcttgcttgcctgccgctcatctcctgtgtgcggcactcgtctgtacccagggggttgtggacccctgcttcaacgcactattttctctcccagacaagatattgagagaaggggaagaattgaatggtctttcttaatcatcaaaagggaccacacattcccaacctgattctgttctcttcatggtctctctgagctttgtagagaaggaaggaaaaggtacgagaagagaaataaggaaaggcaggggaggaagagggggcctcagaagcatcttcaaagggctggatttacaccccaccgcctgtcttggtgcccgggggctgggtgcattcaggctcccagatgagccacagcccttggcctcttgggtccacaccttcatgttagccaaccctgatgtctccatcacccctagataaatggaatcgggcatggaggcatctaatggctaggcagattaatcatatgcttgcttgctttttggaaaccccagaggaaatatctgcagatttaattctcagttaaaggtggaagtgtgggtttgaatcttctatcaggcattgccccttcctactcagcatatctttggaaaggtcaactctgggaaagattggagtgtcggcatcttctacctggtgctgtataaagacttctgacctttcaatggtcctaattccccctcttccttctctctgaatattcccctcctccaccttttttagcacgattatttattaaagttgcaaaggtcttgcattcccacacacacacacatatacacacacacacacacacaaatatatatatatgccacattttcaaataatgagttaccgtaaatggcacatatgagtactcctcaaaattgtcaaggttatcataaacaaagaaagtctgagaaatggttgcagctgagagtctaagaagacatgacaactaaatgtaagtgctatcctcgatgggatcctggactagaaaaaggacatgagataaaaatgaagaaaatctggataaaagatggactttagttaatgacaatgtgttaatatttgttcattccttgtaacaaatgtactctactaatgtaagatgttaatgataggggaaatggggcatgggactctatactgtcttctcgatttttctataaatctaaaactgtcctgaaaataaagtctattttaaaaatggaaaacaaaacaaaacaaagtggtacatgctacaacctcatttcagctggacaatcacaaagtatcaccttggacatgcagctgaaacggccagggtggaggtggggacccagtgagctagtcctcggtaacaaggaggtaaccaagcaatgagctcattacgcacaagcatttcagggcttgctttaaaagccagaaattaaccattgaagatgactccatatggtcggtttccttaacctgttaacttccagagtgaaaacatggcaaaaatgattcctgaaagcaaggaagtctaggatgagctggaaaagagggggcagtttccaccagagggctactttcttttctgagacatgagagatgctgcagtagatgctagagattttccagccagtgtcaggtaggtagctcggatgagttcaggtggcccgaggcatctgacctatccagtctaattttatgcattaaggatattgaagtgggtcacaaaagaagttccatttatttatttatttatttatttatttatttatttagatggagtctcactctgtcacccaagctggagtgccatggcatgatcttggctcactgcaacctccgcctcccaggttcaaacgtttctcatgcctcagcctctcgagtagctgggattacaggtgcccgccgccacgcccggctaatttttgtatttctagtagagacgggggtttcaccgtgttggccatgctggtcttgaacttctgacctcaggtgacctgcctgcctcgacctcccagagtgctgggattacaggcgtgagccacctcgccgggcctatttattgtttttgaatgttgcatttcaatacctcactgaccacaagaaatctacagctttttctctctggattccttcaacctctcccaaattgagcgcctgtcctggcccaatcgggcaggactgaggtgcctggtggtcacctccttagaagtctgcttctaactcccctctgtgtgtgtgtgtgcgcatgttttcctttctcattgacattccagcccttgaaacaaggtcttggctcctttcttattgcaggatttcgttttgggggagctggaacacctgtccactgatcgcctgccactccgcatctgggcctggctgacaggcttgtctgctttgactaatgatgtgattgatggacaaaataaggaagaacatacaaaaaaacatttctgtctggtctggtgtgtcagcaagccttcatcaagtggctgctgaaggtatattttgctgcatggctcattacacagtaatggcattcccaggcaaagctgtttcttttcatgacacaagacagcaggcagctttatgggcgttgggcccaccgagcccggaggaaggagaggcgcactaaagagcggtcatttccaaaagtgcctcaagttgcttttttgttgtcatgaatttaatatgaatcaacacaatatgaaatgggcatgagggatcttagtgactagtgattttttaagactgctgtctaaacagccatcaaggaagaaaggggagggtgaaaccacaacattttctttctccaaacctgttgcaaaaaggagtcatctgtcaattttattgcattaaaaaagtacacagaagcatatagtccaaacaaatgtcttctttcaggctaaacatgtgggaaatgccacatagctgatgccagaatcatctcactcagcaaactgagtattcataacccccattccaatggcctgctgcggatgggggtgacattcgtaagaattacaaatgctactctgttgcctctttgtgcatataataatgatctgaacatcagttctggctggaacaggagagaagcaaagaactgcttcattcagctaacaagatacctgtgggttataacccagtgctggaggatgaaaaggaatcacgattaaaaacaagaaatagagtaggtaaattcttggcctgattttttttctcctctttctttattagggtacagttgagagcaggaacgttcggtttggtcccagagttcctacttcatttttgcaaagtattttagctgtcctcgatattatttcttctttctttttttttgtggcaaattttctttgccaaggtattttattacacatactcctctcttttctttaacttgctggactgtctccaaagagaaatgcttaaaatgaagtttcattttacaaacactttttattctttcttgctagcctgatgagtctttagtggtgggttattgtgaataatatgtgattttaatgagttgtgattagacaaaactctcttcctataataaatactagataataaattagaaaatatatatgagatctttattcctattttaaaagggtgaaagacataaatgcaaaagcttgttatgataaatataaaagataatcttttaacgtgcatttaattgactgtgcttctaagaggcggtggtttgacttctgtgctgatgttaacattgcacagctccaaccaatgcaaactggcactgggatgacagccacctttccaccagggccattagtcgccaggccttcagggggcagggattttcatgtagggcagaggcatacaaatttagaaatgaacatgtgatcaaatccaaacagtcagatgacttcctatatatacaataatgagtataaaaaggaaaagaaggagggaggtgtattttgtgtttttttcattgaaccaaggcagaagtagttgtccaacagcttttgttaatttccaagatccatccatattgttcattacatttccatatcaaaataacaaactgtagagcaaaaggctcatggcattctgttgacttaaaagttaaagcagagggaagtgcccatcaatgcagtaagagagcaggtttagccagaatgagcacaggccagccaatgccaggaacttagccatttagaattgggaggcaggtgggtggtgccatggcagcgaccatttaattaggtacacttttctaggctaaccttggagcggaggcctggtgtcgggtggggggtgctgtgtacccccacttcctgcacttcaggtctgagaaccattagcaagtcctgttttttctccaaactcccaccttttgctgcctttgtggcctggcagaatgttttgctgccactttcttgagtgacaacttcaaagctaagcagtgagatgctttaacctacacatcccctcccactgcttggacccaaaggcttcctctgcaagtgagggcctcaaaggagacctggaacctttattcttgtcctgactttctgttttagaatcaggaccttttcaaaaccccaggagcagacagagggggtgtggcatggactctatgtgagggtctctcgcatgccaaggctgcaatctatccattctccagcgaggttgtttgtttcggagctagtagctgcaggaactattggggagcaacatcatttagcagcaaagatattctttctcagcaaattgcttgaagccaaggggaagaagcttccaggttggtgatgctaagcgcaagagtggaaggggaaggaagccctaacctggggttattttctttaatcttataggagccagccacccgtacacaggctgctctatatattacagcatacattttttctgttcctaatcaggtttgtgtatcttcctggattgattttctttcacaaaactcttaatatttttccagatgcctcctctcctaccttttgtccttcccaactgccattcactaaagaaagactctttggaaaatgttggcctggaagcatgtctattcctattctagtttctggatcctgtcaacaatttttacttgtatgattgtctcattatttttattattttaattgaagtggtggcattatgcaatttggtgaagaactctccaaatccacttggttctggtctccataattcaaaacaagttatttgatgggtgtgtgacttttaagattaacgttaagattgtttgtttaatttgtgggattgatttggtagatgttttcgtgttgaaagaaggctgattggttttggttgggaaatggaattctattgcgttcccagagagtctgccatccagagctgggcagcttcctggaaactgtctgccccaagcaaaagaaagtgctgtgttggctgcctgttgtctgaagtgcagagtccgggggactctgggagctgctaccagatacttgcccccacagtgcctttgaaacactctgcaaggcaagatgaccctgggggaggagcggtccccacctgaacccacaggttggaggcttcttcagggagaggttgacatgcacctttttaatgcatacacattaaaacacaggttgagtgatgtgtggatgcagggaaggccttcctagggaatgacttcagatggcttaatatgattctcttagcctggctgctacttcagttgctggctcctaatggggtcccccttcttcacacaggcgcaactgacattatctctaacctccgccccaacgattccctgtttatcccaaattgtggaaagccttagaacttaatcggcacccacatttgcacatcccagaagagtgggagccttaatgtcctatggggcaagactttgaacacttatttcaagttatttcttccacgtctgtggtcctccccgctccctgctgatggatgatcttgagaaacgccgttaagtggtttctcagatgacagtcttgcgagattaagcgatcggttgtgctccaagttgaccagctggaaaatgccctctcatgtggacttcacctccttcctcacctcaattccctttgctctcgcttctgcttcctaggttcgtaccctctggcactttggcagcacgtgagctatgtgggtgctctggggatgaccaaagactggatgccaaatggtatcagaatgactgggcttggcagttcctcatcagttattctgctggagctttcagggactattagaggctgaatgactccatgcccagcaggtactttcagaaggacttgaggatataagggaatgggtcagggaagtgtggtacaaaaaaaaaaaaatacttgtttgtttgtagctatgccaagatatttcaaacccaaagcctgcctggatcaaacacgtgactttgtctccatggtatgtcagatggcaggtgggccaagcctgaagaggccaagacctcctcctgctccagctgaacacatctgctctccaccttggaagccccattctcatggctgcagtctttgaactctgatgaggtgtgcgaaacaccccatcgacacatcatatcagatatcttttgaaataaaaatctcctagatcagtttcaactcattccaaatgtcatatgtatcctccagggtggaaatcaatcttccctccaccctcaaatgtttgaaatgcaatgtggattttgggtgaaaagctggcaaatgttgagttggggatttgagtcagggcttgattctgccagtgccatgcctaccagggcactggtctttctccatcccatttggggtgtccctaacttcccccctataaagcctgggctcctctgccaggcattgtccccgtctctcaaccgcctctctaaattccctttgtctttcaagggtcagctcaagccctgtcttctgcatcacactaaatctgatccttgcattccatcccagttaccccccaacacatatgatgtgagcggcacaacctagccctgccttgccatattcttcaactggttcatgtgtgtgaatccatctctctagcatgcatcattcttctgtgtgcccacatgagtgtcccttttattgctaggccctggaaacttggtaaatctttatggactgatttatagacattgggaaaaggaaagagatgttcccaatatttgttctccctcctccatcttatacagagtcccttgcctccctctttattcctgccacgtgtttacttgtggagatttatgcagactcacccctgacccaggggatggcagtatcagactcaccatcggaaggtttggttaatcacctgatatttctccaaaggcacttgacataaaacaaaacaaatcaaatgcacaaatcatgtcatatataaaacaaaaatgagcaccataaaaatggagaaaaaaatgtaagctacaatgcatactaactttaacctataaataagaccagggctattttctgatcctcttttgcaatgagagctattgcaaaatgcagaaagaaacttaaaataatagcaatttaaggcaaagtgtgtgttattaaaagtttgtgatgttgaagagccaaactcctattccagtattgagatttaatatgtacttcatacaaaaataaatcatgtaatattttcatggcaggcatagaattttatggcttttatgactatcatggaattgggattcatattttatagacagctctaataacatcaagaaaatgctctgggagaaatgggggcttagagaaagacgagtgatcactcaacagaagctggaatcaagcgtaattaaagcccaaaagtaaggatgcgtctccactccatgggttcgaggcagggcccaggcaggaagagtggggtgtgggaagatagtggctccatggagagtgatcttggcaaaataggactcccctggtgctgacttacttgatcctgcaaatgtccactacggaggtaggagggcaggcagaataacttactcaagacatgaatacattaggaaggatactctcacatttgatttcctggatatctaaccatcctcagcaggggaataggctccattttttgcagggggcagatgcaattgtggagggggaccctaggaccccctacctcactcacccatcatcccagcaggcttctgtttccttgcagcaggactgtctgagaaattaaggtagccaaaaataatctaacagcaaccaccagttgtcaggtgctttgctgagctttgcagggatggtctagatgaagtctcatagccattccatgaggtggagaactggacgtaccgctctgtcttccccacctgggcactagctccctgaatgctgtgctgattggtaagcacagtggaggacctatgtcctcgatgagctaagctttgacacatgattctagaactcctttcccctctgaggcacagattgcaaaataacttctagtcctggggtaggctgaccccttattccagctgcaggtagactctgactcctgtcccgtctcaccactcggcccaggcagaccccccagtgcagtcctgaggcaagtacagcagtggtccaaagtgacaccagagacctgtgccatggccaccccgcatctgtctacaaaggatgccacctttccatgattcctggaaaccttcctttccatatcctttagatgcacatttctcttttaagctcatgatgtgctgagcttgtcccaagtgggttctagacccaactcaatggctctgtgaccttgggcaggtcccctcatgcttcccggtcccagtcacctcccctgtgagaaggggatgaccttcaggctctttgtctttgggacattgttgtggacttcaagggttagccaaagtgaaagctctctgtaaattgcaatgtgcttcaggcatgaagcgtccacacataatgacttgaattaagtgttctttttatttctttttacaaatataaacccaggcgagcataagccaggcagggggtgcaaagccggagtatgcatttggaagccttcgcctggtgtttcagcctctccataccatttcggatgcaactcctctgcccaccgaatactgctgtgcattggcgaatggtattttgcagcaatatttctgctctgctctcagaaatatgcgagtcctgcctattacagcatctgtagagacacactagggaggaagcattggctccgaagggctgagagccaagcagtccccttccctaagctgggccctggcctgccttcccatgtggcactcttgtaaggcctgacctcctcataaccctggccggcaagctgtgatgaatgggaggtcatggtctcagcagaggcgctggacacaaaggacagcagtggccctcattccctgggaacacaaggatcacatatccccataagttgaattctaggagagatggagtcctggctgggcccgcggccaggggtgtggactcttctagaggctgcagccccagacctctacctcccccagatcctggctccttctaaatggaggaagagctttcaatggctgcctgggtggtgcagctctttaggatactggaaaacctctctttaaaggttcatggtcatttgcattcttattaaattgcttggataaaatattcagccacaaccccctccatttgactcttaacttgataagacataatttgcaattgattattgctcaaacattcctggtaccacattacgatctgctcatacatctcaccctctctctgccaatttagaatgaaggaaaaatggtttctctgacctttgacctgtctgaggtgggactgttaggtcattagggccattaggaatcaaaacaccccagtccatagccaacagagacagaaatggatgtgtgcagcaatcagctgagcttattttttttttcttttcttcctcttggtaagatacaggtatttttcagagttggaagacgtctcgaataaatgagcttcgtatatatatgcttttaatgtgatttgcctgtatttatttgggtgatcacaatttatgccaagtgaaaaggttaagagtcctggaaactgaattattccatttatttgcagacatgatacagtgcagggcagcagaagggctcatcctcatcttgccctgcccctgacctcacccctgacctggagatgggcatcgcggctctgcacggagagtcatcaccttcaggggctggctcaggagccaggcaagtcccccagggcaggcagcagtgtccatctgtcatgactgacctgaataagcttttattgagtagcttctgtgcaccctcttcttcctatcccagggaccattctccaggcctatacccctgtgaattccccttgaagggttggccaatgagtggcacccataatggctcatttcttcactgcatttcagtttgcaaacttatcttcccctggattatttctttgcacccacataagagccttcgaaaaatgcatgcaggatttagccctcactgcacaagggaacaggggcacagtaaaatgtcccaccttgttggggggtgaggtcttgggccacgattgatgggcaggaatacaggtctcccaggccctggcagggcacactgtgctttctccccaaccctcagcagggccatcccccaggggccctctagcagacagtttgcaggcttctgactccaaggaaaagctctcatggtgaaggaatagcttaatgggagcattggttggagacagagtttgaggctgtggactcctcatgcccccaccatcacacactcctcctgtgtgcttagccatgcttcagggccggagccaagcctcctgcttcctctttgtgcctgaccgtccctgggctgtgtcctcttggcttgccttctcatcactttcagattaccctggagtaattggatattggtaaccaattactgaatttttcacatcagcttcatcagtgactcagacaactgcaccacagtttctttcaatgaagagaagaattataataatttgcattaatgttctatgagacgtggaaagccaaggtgcttggcctgccgagtaggggagggtggaagctggaggctggaggcctggcccttgacgcaggggtgtcaccccccagcctccctgactacaccctaaccccaaagctgtggccctctctgcccctaccagagcactcacttatttgtccttccctccttcctgatgagagagggtgctgctgcctctgggtggagaacttggggaaggcttcctgaagtcactatgtaaaactgggccttggagacaaagaatgtggaactgcagctctgggggaagatattctcatctgttgtagaagaggatgcaatggaaggcggggcgtggtggctcatgcctggaatcccagcactttgggaggccgaggtgggcggagtttttgagctcaggagtttgaggccagcttgggtaacatggtgaaaccctgtctctactaaaaaaacaaaaatttgtctctacttaaaatataaaaattagctgggcatggtggcaggtgcctgtaattccagctactcaggaagctgaggcaggagaattgcttgcacttaggaggtagaggttgcagtgagccaagatcacgccactatactccagcctgggtgacagtgtgagaccctgaccaaaaaaaaaaaaaaggcaatggaaggaaagagtgggaaagctgaggatgtagagggagttgacctcgcagacctgggcatattatccccgggcccaccttggagggcactagcagacagtcctgcaagctcatggcttcctgtgtctgtgttggagggttctctggccgaggaagtatgggtgacccatgcccagggcagaccagaaatagcatgggggttaaacagccacgagcaaggatgacagttagtgaataaataccctggcttcttccctctccgtgaggcagctccaggggctgctcctcccagccactcagaggttgcccagcaggatcgggccccagtggcccatcctggccacctgctcctaaactcaccctttgttggatttcttctcttccctaacttgtctccctactttttcaacagtgcttcctgggatcctctcccaaatcaacgcattgcccccatatccttctcttaggatttgtttctggagaaacttgaaagaaggctgctttgcatgtcaagtgcaaggtgttccgggttggggtggtattgattgactggattgctgggaatttttcagccttgggaacggccttcccttggatggggcagaggccctgcaagcccaccttcccctgatcccacagactccgcctatctgctctccccaagcccccacgcagcccacacgtgctctgggtggtgggcagcctgatttatctggagtgtctgggctaaggaagggaggtgagcacttctcgctgggagggattttcagctcatttcacagataaaatcaatcagatctaaaccacattcattgtggccatgagaagggagtctacacagcaggggccaaatgggagatcctttcctcccttcccatctggctctgccttagcctgggggcagcaggagccccaggcctccaggctgtgggaggcactgttaccttccagcagtgctgctgcagagacactggtctctgctccagagtaattggcatggccctgacttgggaaacatggacaaaagacagggctgcagctagggcatggggaagaagccaggcaggtggaaaccttccatcagtccctccaacatggatttttttcattttctggatggtaagttagccgggaacaagaagaaagtgagggtataaccacacgagcataaatgtactaattccttttgctttcctccatgatactgaatggaagaaaggagtagcagaagttggatggctgcatggcagtgcctagaagctgccctgctgggctgtctgaggccttcggctgttgagtggtggggatttctctgtgttttccaattgtcctcattgaggaaaaatgttgggccatccagctcctttctagatggcttgaggtcagtcctgcagctcaggaatggcatgaacttggacccctgttaagacttgcatctccctgcctgatctctcagcattgtccacccatggaacttaaacatctggaacatgtcttttctctcctgtagttcagtgtccccaaacagtgcagcaactccaaccaagcaactcaggaggctgagagagcaggcaccccatttcctcctccagttggaggatgacagccttggtctcattccattttccaagctgcttgcatgtgggagggagaccactgcttctgtatgaacggttttctctatagtttctttatagacccagatgggctaggttggaaaggccagtatctcctgcaagtgtctcctgttctcatctagggaaacaactgtgctttgtaacttgcacgtgaggggccaggattagtgaccttgaaggcaacaggccagtgagtatgcagggagtgagctccagctgcctgtccagcgtccatgacctttcttctagtaccagtaccctggtttattctacagaaccatcgcttccccttccacttcatgtatttcatctggaccaccccaatcatggtcagatgacttaagctacaccaatcagaacatatgggtctttaaaggcaacaattgaaagggagaagtcatctcttttccagttgctacaaagattaaaatgcaagcccagtgctctggcagccatcttggcaccatgaggcaaaggtctgcctgagaatggagctgaggcagagggaaacagagcgaacaatggagagagacggacttgaataacattgtttgagatcagggctccagatctagtcttggactcatataatgtgagcttacaaattcttttttgcttacactagtttgatgttaagtattcttgtcatttgtaactggtctacgggcaaatacccaaggctcaaaggtagcccatcatatccccatccatccgtttcaatgaaatttattccattcaattcaattcaactaacatttattcagctccttttaagccctgttctagatgctgagaaaacaaatcagatttttatccttaaggagcttatagtcaagagcaggaagcagagacattagaaattgcctccaatctaaggaagcagatactccaaatgtgctcttaaaagagtgcatacaaatgtacatattaattaatacatgctaattagaagctgaacacagtatagtgcaggaacagagaggggtaggagattaattctgactaaagaaacctaagaaggctcaaaggaggaggcaggctttaatcttggctttgaagaatgagtaggactttgagaagagaagaatgcatgagtaagtgaattaataactgaatgcaacctaggtttaaattatctgtcacgtgcatgggtgccttgtgaagcattagtaatgaagaggctttgcgtataggttatgcctgctccgggcttccaatctagcgaagaaggtaattcctgctgattatttatttatgtatttatttacttttttttttttttttttgatatgaagttctgctcttgtcgcccagactggagtgcaatggcgctatctcagctcactgccaactctgcttcccagtttcaagcaattctcctgcctcagcctccagagtagctgggattacaggggcctgccaccacacctggctaatttttgtgttattagtagagatggggtttcactatgttagctaagctggttttgaactcctgacctcaggtgatccatccacctcggcttcccaaagtgctgggattagaggcataagccatcacacctggcccctgctgataatttataatggaaagtggatcgtgtggaagaacggcttccagctagcagcctaggaaaggcatccggggaagggaatgaagaggcgccactcattcagcgatgaagtgggtcatcctaagactagagaccagtcctggaaaatattcagaattggataaatgagagaaatgggaaatggatggctaccttgagctgggacctgactgtgagaagggaagtagtgtgtaaagggtctcagagaggcttgaatgttgggctaaggattgtgatgttgtgtgatgggtgaagggaagccactggagacagtgaccctgagcatgatgccagagtcttatctgggaagatttgtctgtgcaggggagaaggagaaatcgagtgaaggaaggctgaactcttgaatgcaagtaggagaaacccaagccggactggacattcagtatcagggaaagaagtgacattgctagatattccttgcctggggcctggctcaacactgcagcctttccttcaccaatggcagcccagatttctctgcacagtgggtgggaaatgcacctctcggtgcttctgctcacatatccttgtttcagctcaagagagaaagggattctccctgctgtcccagttttctatcattccggagaagagcactgacaggtttttcttaggtcttgtgtctacttgctgagcaaggagaggctaggatggagcattagtgattagcccagcttgggtcaagtgaccacctttagccaggacacagcaaccagggatgagggggtagtccttactggagcaaagactcctctctccctaaagtgacaaatctcccaggcctggctgctggggaggttcgtgtgagtcatgaatccctggttatttgtgtctgtttcctagagctgggcttattctaggagggactaagcgggtcctgaatgagatttatgggaggagagaagtagagggttagggaggggcagggaaggtggcagtgtgggtgagtgatgagcccttggaacctggtgtctctcgcaccttccacatgagccattcaaagcccgcgatgaagctgggcatctatgtctgctgcagagtctccaggtaccttgttcacaccggagggggctacagcttctgctatttgcctttgggcacctagcccggaacctacaattttaggaggggaatggaatactcttgttagtctgttcaatattttgtaatatgacttggatgttacgtattctattaacaaaggtcataaaggaaaaatcacatttaacgggctacctccttatctcatatgaggccattctccgtggagaaatggtgctgttttaaacagtaggagccctggaggaaaagctcacccatttgggtcctagggctaacattcttacagcacaccagccggaattatcccctccgtctgaggtaccagcaattaggacagcacccccagccaggccccgaaacctggctgagagacacatcagattaatacatcaccaggtatgaaagcgcagttagaatttgactgaggcacttccagcctgagaaagggaacgatttatcaatgcaaacttaataacatctatttgaatctaactaaaaatcaatatttcattaccaaattgttagtgagaatgaagaaaaattgcggaagtcgggcagtttggtgctagggaagcgtcaggagttcaatgtgaagacggaatgattcatgaggccgcaccggagtaagggtgaacgaggacgagtgcggaaaacttggaggggccccctcgctcatgaccttggccgtgacggggggagcacgagaaaatgagagtgactgtcagttcccttcagggatggagccctccataaatcacagggagaggagaagagcaggctggggtggaggtacacgaatgggggtggcaatttaactctttggaccctgacatctaagtggcgcttcccacgatgggaagaacgaaccgaatgggtaaaatccaagggttgggggaagtggtgcctcgtggtgagtttctgcaaaacagagaagagaagaaagagctagcctgtgaaaagttgtcatccactagattcagctacactcaagaccagctcaccttccgttcccatcagaaaagtggaaatgacagcctatgtcttgtctgacatgaacataaatcagcgatttggaaggtctgttctaggtgagggtttggtgaagattttcaccctgaatatattgatccgaaaatgctgtgtagtgccatgactagtggcattcattccccatacgaatgaagtccttgcattccttcccaaatccgagatgcggattaaacctcagggcttgctgttgctttgattattgatctcgttccatcctgtgtttggtttcactgctctggccatgttttgctggcaagacattcaaagaatatgcatttgtcctttagcaaggaatggaggagaatcacataagatttgactcttatatgtaatgctccataaattaaattcgggcctctgctcactttattcattgaagagttatgcatagggacccagcagcatgtcagatgaacacctcagtgcctatctgcgtttgagaaatcatgggaaaggaggtgtagttggccctattggcctaaatctcaggcactaatttcagtagaattccttttaaaaagtgagggttagcctctcagtcccaaaagaaaatggggtgtattttgacagaagatggtaatgcactgttttactcaaacttttttttttttaaatcaaaactggtctgcatgggatccaaggatttaaagatgtgtggggggcattaagtaagctggcattgccctggaaatatgataggaaaggcaagaaaagtcttccacatccgctctttatgggaataaaacatgctctgggtcacactgtgagaaagggtggtggggtgtgtggagctcccagaattgaatttctcagcagctcaggtttcctctactcactgctaggagtgacccatgctaggctacatttcccccttgagagcggtccccaagatcgggaacctgtttaatcttgtgagtgtggagttccttgtgacccatcttaccctaccactgggacacatatggccttatgcctcacaggagcaaagctcttacatcccacacgcagtggtcgtaaaacattcggcaaacactgtttcaatgctaggaaccctactgaactcttccatgaacttcctcatttacaactctgtgagataggttctattactgttatctccactgtacagaaaggaactaggagttaaggaaatcaggtgacctgacccagcacagacaggaagtggcagagcaggatttgaggcccagttcaccctcttggcccattgccctcccgcccccacttgtgaaactgccatgaggtccaggccaggtggttttggctgtgacaatgtcctggttgtcttgaacctctttaatgggatgcactgttgtcctgagtcagtgtcccattgttgtgtgagccagcagcccatgtggtgccacacaactgaactgctgttgagtgtccctgctcatctagttcactatctgccatggagccagcacaacgattgttgctgagagccttcaggccactgcttgtacactggccccaaatacacacttgaatgacaaggagaggagtccaaaaaagagagtcgagttgccataggctctgccaagccacttctgagtacatctcaacaactgaacggctgcccacctctgtggcacgagcaatccctcagtttatggcatttgcccaagcgcgttctgcagaaatcaatgtccgtgacgtgcttcccaggatttacatgctgggaggatttcccctgtggggtttaagggccagtatctcaggggttggcccatcagtgtttgaaaatatgagctggagcggactctggaaatcaagacaagtgtacctctgagaatattatttataaaagcctttttccaaactttagagtcttggtgcattttttttcaagatggcatcaattgcctggctaggaatatgcaatagagtccctgtagaaatgacttccattcatcctcagggacctggctgtggggagcctttagggaaagcaatagggatcccctattgctaaggtatggcatccaatgactggcaccaagggtggtgaccattgctgagaattggctgtagaattcccatttacattgatatcttgacttgctagctggacagataactatttcaaagtagaaaaaagcagacaacacagtaagcatcgaatgaaataatttcagctcaaatgtcctgacgtgcacaggaggccaacactaacaggcagaaacttttaaccggcatgggagggcaacaccacacactagcacagctcagaatcagcagctgcaacccatcaactcgtggctgagcatgctgcgggaagggtttttgggaaacttgaccttgtccaagcttatcaacacctgtctgtcaatgatactctcttgcactcatcactcaccaagggccattttgagctaagtgccttcggttgcaatacacagaaatgtttgggaaagtttggatgtgttgggtatcactgaagaaaagaatatttgaacccaggtctcccagatcagtgtccataggctgctatatccacacggaagaaagtatgtttctcatgtctcatgtatgcattgtgaaatgctgcagatagcaaacaaaaataagtaatagatgcaaaatgcttaccccaggtcctggcacaaaataagtgattgatatgcaacagcaataataattgcttcattattctctaactactgcctctattcctactagtacttctcctgtaattactacttcaagttaagtccaggtttgcttcagggatccttatctaaattcactgtggccttccacaaccaaaaaggctgcgcttaaatgctacacttcatgatttgtagcatttcactctagatggctctcttggttttaagaatgaggggcattccaagagggaggactctgcagctgtaaaaaagagtggtgtctatctccaagaaatatacttctgtgaaacaaagcaagatagagaacaggaggtgctgtatgctcttatttatttaagacaagggggatgccaatatacattgtatattaaataaataaagttaaaagtcataggtgtggttataaggggaagaaagggaaagagtacaagggacagagagagaagctagacttgtctgaatagacctggtttgagtaattaatttaggaacccaatagatattttatataatgatcaaacacaattaattcaaaattttaaaaaatctattcctacaaaccaagggcaaaaaaaaaaaaaaaaaaaaaaaaagaaagaaagaaaccaaaggaaactaactacatgttgatttgattatgtaacctacagagataatttgctttaggtgaattcaaaatagcttccctaatgggttatatcctaagggcaaaaaggagctgccaacatggttttcagtatcatattattagtaatcatattggtattgtcattctgaaattctctttctttcacacatgtatgtagtaggaagaagcaatgaagtaattatgctaatgccgctagaaaagtatttgcataagaaaagaaatacaaatggaaaatcaaaattaaaacctaagtttgaatgaaaaatgtcagtttgaatttgtgatgtattttcttttgggaaaggagagttatttcctgtctgttcactgaaaagacctgaaaatgatgaccaacccaggagtgctgggaatctctacagccagattgtggtctctaaataccactttcaccaaaacgaattggggctccttagagaaatgtctgatcccagattcagggcaaatcctgcagaacacgttgtcagataagaaagcaagaaggctctccaggatgcctgacatggtgtcaaaaaaaagtaagagccaacatgaggcttctgttggccagagacatggaaatttacatggtcagagagtttcactgtgaatattaaccacaatggctgaaatcacattaaacgtgttaaaatccacttgctcgcagtaatacttaaaaaatcaaacaaacaccttattagtcacctttggaggccacatcatccattcattattgtgaaaactggcaaaggcaaataaaaaagaatccagcatttaacttgtgtttgctgtgagaactatacctcaggctagccaaatagttgagaacagaaattactctttatagaagtatggcagctcaaaaaggaagaaatgatgatagattgtttaattcccaaaaataatggatttaggttatagttattaatggctattgacacgacaagaaaagagttagttgggcatcatgtacttccaagcctgaatcatacccagcttctagatctaagtatcagtttacaggaaataaatacaggggacagagaaacatgttaaaggacacaatagagatgaaatcagcaaaatccagaatgaagaaatttctgtaggacaaatgacatgtttttttcaaaaaataaaaatatagaggaaagacagggagaaaaaatctaagattaaaaattgaataaaccaactgtaagccaacaagtaataaaatttttcctgttgtctattaagttgttttaaatttgactgtatatttgatgatactctgctctcattagataggatgtaatgttgtttttttagaagtacaaactgacatatttattgatgaaagagtgtaatagttggggtttgtttgtcacaatactttgctttggtggtggagagttggtgcaattgatgaaacaagacaggccatgatgatagataattgttagagctgggcagtatgtaaatgagagttcattatgttattctctttattgggtgtgtgttggaattttccataataaacgttaaataaacgaaagagtgtgatatgtgatataagcctttttttcctcacacatctattgcatacacatattttgtctggcaccgtgctaagatagcagatagaaagtttgctatgatgcagtcttgtcctctagggactcgtggaagttggagagacaaggctgtggtccagagagcacagggtttgctggaaccctgcaggagggcactgctgctgtgctggaaacctgctttctggtgtgatctgacaccagcagcagccaattctctagagcccactgcctcctgaggactcagcagagccacagaatgaaggaggtggaattatctctattgagatgggaacacgcactagtattactggccacctcaccgagggtactcctggccaggtaaaaatacaccttgtagaatcagatataatgcattggtgtagagaccatgtgctcactggcacacatgacaactttaataaagtccttcaattatctcacaactaactgagcattgctgctccctgatactacagggagtcaggtgggtcgaccaacacctgctgatgtaatgcaatcccttcatgggcgctcatgataattctagtttggggaagtgtgccttgaaatggaagggggaaaaatcactgcatcgggtaactaggagggctattgtgtatcccaggggatgctgtaatccatttaaggcatttttagttcttagccctagtgtgtgcctatagcctcatgctctgtggtttaggatgagctgaatggctgctcttagaggttgctctgctcctgcctaagtctccacacccaggagaaacccacaactcacctcaaccacgaagacaaatccatatacagtggcagcagctcaaagaagcaagtgacaacacagcctgtctagcactaccctgtgcagtatctgttgtgtgccaacccatcagctttgccaaagatgtctctttgtggcacagggagtctaaggtggccattttctccatttctgcttgctatgagatgcagctaaagagttcatcagtgatcaataaagagccacatgcttatgtttgctccttggatctcaaggacacttttttttttctttaaacctcacctgcttttagaggagtccctgctgggagggaaagaacaaaatactcttaaagtagaagagcttctgtagaggtccctggtgtctccttgctccctgaggacagccacagctctggcatctctacatagttttctttgatggagcctgcactcctgcaacaaaagggcctcaggtgagctctccatctgtggggcttaccccacgctctctaagggcttgggggcataaatcaagcaagtggcgattacaatagtgggagacccagctctgcctctgggcaaagtcctgcccttggggatgcagaacactgagctgttctccataaagtacagcttggaatcatggagcaggtcaagaaaatgcacacatttgaagaaaaagaacagaggacagaaggtagaggtgggctgttttccaggaaccagccagaactgttgaggggagaatgggctcatccaaggtattcatgtgcatgtatgagtcctccaagagcacagacaagtgcctgatctctcactgtgccacagccatgacagcacagagactttgacacacacttctgagcctgaagttactcctcccttctgcacatcctcttccaaattccccttcccatcttcccctctttaacatgaaagctacccttgactgtgagatagcatgaaagtttgggcaatttcttgaacacacatgaagagtccttgatgattcaagttccatttggtccccatacacaggtctttccacagacaaacgagatttcttggggatttcatatgatacagttgttccttctccatgcaagttgtagtaagtcttctggcttcttcttactttttaccaccatgttcattgtcaaggtgtcacaggtcatcactaaccgttttaatgtcttctatggacacacaactactggcattaataggccaaaaaaagcgctgcagtgaacagtctctctaagtattgtgtagaccacattggttattctgtatattggctatacagaaaaatgtgtgtgtaaatgagtatgtgcaaagtagacctatttcatgttcatagaagagtctgagaagtaaggtttttatgtgggatttcaacactttcatctcctgccttaaaagctatatggtttgatcatctgtgtggatgtgatacagaatgcacccaaaaccctttgactaaaagcttcagagtgtagctgtcttaatttggtttttaaaatacagagatatgggagcctctgcgatatcaaattccagaattatttgcaaatttcagaatatgcttgaattttgccttcttaagtatatgtagttaggaaacaatatgaaaaatccacttaatcatgatgagattaaaggatttttaaaagctgagttgcagacacatttacattccccgataatttcttaattttctttcaaatcacctttcatcttcataaaatgaactgtaaaaatccttctgaattccataatgtgccaagaaaaatggggaaaaattaaggaggcccctaccttttaatcattctgttcataaagtgctttaactgcacgccaggaaaaaaatggaggctctggtgtctgaggtattctgtgccataaactcccataatagaaacagatggtgaaactgccttggaagtgaagaaactagtgtacacgcagctcaccctaacatatgaagagattcagggctgacacatgaaggaatgcatttggcgtggtgccagcagtacactctaattcagccgtgagtgttcaagcttgagatgggagacccacaatttcaggatctggaatgccggcagctccaggatttagaatgccgtggaaggttcttgggctctttccatcctgccatggaggacggtgttctcagtgtttcaggtgaccgtgagttccaacagagagctcttcctggcttttataaatggttcataaaaacaatagtggagaaatgccaggtttgctggagcttcctttaactaagttaggatttgctttttacctagagctgccgccagtggatgctgaaagaagagaaaatgtgcaggacaaagagacatcagtgaaaatgatattagacggaaagggaaggaccctggtgccagccccacctgtgaccctagttgattggatggcacgtgcaggcaaaggagcctctcttggatatcgtgttttcccaagaaaattgaacacatttccatgttgtatcccaatggcattaatacatgcatttttttttctatgtgctgtattagttagggtgggttaaattctgttacacagaccccaaaacgtagcgatgcaaacacaatggaagtttacgtgtcctgtatacagcagtctagggtgtgcaaagtggtggggaggtctctgtccaccttgaggctccccatccagcggggtcttttcacctccagcacccagcaggtgggagggagagagcacagtggaggcccactgctgccttcagagctgattcccagagttctacattccccttcgactcataatccactggtcacaaggacttgagtgccacagccttgcacgtagacagagaagttttgatggacagctgcattgtggcacgtggatgtattaactagatgttctgtcgtcccaggagggtcttgcatgttctccccacctattcaagcctgtctgaaattgatgctctcttttcccttccaggaaatgtggtgtcctctgatcctccttccttcctgagaactggggtccttgcagatccgccaagtccagaggtgcccagtggccctgcatttccttccaccagagtcagctgaattcagatcaaaacttagaagaacgttcctccctccacgggactcagccctgaggctggggtggagctggggaccagacccagtggaaccctcattgtttatcctctctcatctctgatctcaggcactcaggtcccaaccgttctcttcctagcctctttacttctatggaaatcactcagacattgagagacccctgttgtgagaggttgggagactcaagctctacaagcacaagccaatctcagctgaggctgagcctgaactattccttgtgtccctgcaacaattctccttctcagcactggcaaatgatgtttgtttcccaaaagcaaggaacatgtgaggagcagagtgatatttccacttaggaccaaaccttccaataggtacaacttccctcatgccattagccctccttgatccagagaggagacagccaggcaactttagtctctgcagggcctagtcctaaggtgattgtgtaggatttgggagaggaaggggagagctgaccactctgatgttaccctgagatggctcctgtgccgtgactgactgtgctgtgaccaggagactcagcttacctggagtggggctgtagggacacatgagccaatttcctaccttaggctggccagaggctggtttgggagcaggactaggttttgaggggtgctaaagcttaaacagtttgagaggccctctaagaataagagtatacaattatgagtgcaaaactgctagagttcctccagggcctgtgcctggtgggtggggcaaggggttccccagagacttgagcttcataaggactctgctgtgtatggaagtagggggtagggggagaacaggcatcgtgtctaggttgtgtgcaccagccagttagtgctggtagcatgaggcagttgaggacatctggggctgagggtctttctgagagcagctgatggaggaaagggaggcccttgcagaagaaaagtctttgctgctcagggatgggactgaaaggctgattgtacagattcctgaccccttcagagctgattcagcacttctgcatcacctgaagaaagagaaagagcgctggtgccccttctgcttctccagcctgctttttctgactgaccattccctaccctggtcaccccttcacctgtggccacagacctctctccagtaggacttatagctggtttcccattggccatgtggcttccatgagagcatgcattctcaagagtaagcccaacactgtctttccaggaggctctcctcaccctcactccccaccccacttcctgtacctggaatggtgtggggaacagtacctggaatggtgtatggaagaagcctgattagatgcatggaaggatgaaaagatggaaatctttagcaggttcctattgaatggaaggatcagacactgcctcacagctgcttctgtatttatctttcttcttggcaagtcttgctttgaatagactgcaagccccctgtaagctggctgtgtgtccattgcattattgttaatctctcacagcctggtagagggctgagtgctcagaaggatctgagcagggctggtggtgcagctgactccatcagtggctgctgttgacatttctctagcatgggaagacagtggaccctcggtgtgcaagggaaagatgggctgcctcaggcatacaggaagctgctctggttgcaggtatactcctagaagactgtgggggtgtggcagccatctctgcaggcaccaggcaggggtagctaggggtcagcctcccatctgtttctgctcttcttatcctcctgttcatagccagctcccttgagagccttattcaggctccatgaggctcagttagattctagggaagcttcttttttcccattgcagaagggtcagcagtggaggacaagaggccaagtagcctcagaatattggggctccaggaccccaaagggatgtttcccaactgattctctaggcccataaacagatgggttccctgagggccctgctctgtgtctgggggaaggaaacacccaggactggttgaattccagtgagaacgatgctgccgttgatttgtggtttgacagtcaaaaataatccaagcattgctttgcatgtgatttatacaagtgtcttaattggcatcttgattatatgattgcgtgaagggctgttttcaagaaggtgtatctctaaatagaaaaaagaagaaatatacagctgtgaagtgtgcgtgaagccccccaggatctatgccttccctttgcttttatgcactgacaccacattttccagtttctgcccctagactggacctttagtgggaaacatttccccaaattgcataaatttttcctgcagacatggagcttggtttgcagtttttctctggatctgctgcatttttctctgttacacaaacttagtgatgtggtctctcctagtctgattacagctaattattttagaaatatattttaaaggcaagtgatcttaactttatggctaatccaatggagaagatctaagaaagacctgaaaatcataaaatgttccagaacattatattttatgcagtccagaatgtgacacatggggtctttaataattcactgcttgttaacattaaacaactgttaacatgctcaaataattagttatgcttgcttgacatgtttgcatctttaataattgatgcatttatcttaattactaacagtattatggtcgtaatatgcatcttttttctatcttagaattttaacaaaaactgactttttgccaaaaatgattatgctctaagttttaattactcattgtaattaaattgcaagctgcagtattttactaaaatatctttcacaaaaatatttaatggaaaagaggtgatttgttgtttatgtagccaagttagtaaatatttcataagtttgatattaccctttcagagtggatataaaatagcattactttcaagatatgagtcaatttaaaagtcttctgtagcttaagatttttctaccatttctactcaaaatgtcattcccccgccaatccaccaccactatagaaatctggtaccactctttgtgtggaagagaaaggtttctttaaccagccaggcaagtaggaacttgaacctctgtttcaggaggtggtgttgattggaaaccaatagaaaagcgatgtccacactttccctccatttcctttctccagccctgtttatgtaagctagtccagaagaccagcattggggtgactgtttgattaaaatgcaccttaataaggacgcagacatatgtcccattgtttaagctttgtccaggtgctcatgcatgactggaagcttactattgattgagaaagacctactgcttttgagaacattagcgctgtaaaagcctgggagattatgagaagcaaccacttcatttactgacagggaaactgaggcttgcaggcctttggcccaagctcacacagagtgacccaggtagataagaacttagatactcagatgacatgtccagatctctgtcttatacacctacaggcctttcctttagcccgttgggctatctttgaggattcatcagggttcctgcactaggcaaaatctatcagcacaactggtcagttccacagaaggcagggttatgggccaagaccttgccatttcttaactttctaggccccttactgggattccattcatctgggctctattttcactgttctggggctcacctaggctggaagcatcaagaagtacacgtggttgagatctgggtgatgccccaatgtgttttgctggttaattagttactgctgtaagtcatcagaggttttcaagatgcaaatcaagcaattatggggctatttggaaatgacaagcagaccaagagtaaatctcagccccagcagaatgaggcccggcttactaaggacccggaactcaacccactccagtctgcatcctgaacacacaaaactcttttcttcgtcatcaaaactgcctgacttcttggggacctaagagaggggcagggccactggatctgtagcatggggaggtgtctcagttcttcaccatcaatttcaaaagcacccagatcaattaagatgcctttagtcatagcaatgagcacaaaatctcaacttatattgtcttgaaaaatgtggaaatttactattccacaaaactaggtatccagagcagtggggaggagtgaggtagaacgcctccattcacagcacagtaatctcatcaaggacacgggttctttccatctccccagtctaccaccctcaagatctgcttcatcacaagccttggcccccttgggtcacacaatggctgcagctgttcagctaccatgttcagacacaatatccagaggaaaaaggtggcactgtctgtctctgtgctttccatgtaggaatgagaaaatctttcccagaggccacagcagattttcacctatgtctttttggctagttctgggttggacacttcctcctgaaccagtcattagcaagtggaatgaaatgaccaggattggcttaaatttgtcatccccagatagccttggcatagtggagtcaaccactgtatccaatatgctcccttatgtcaatcaatcaccccttactcagcagtcattctcagctgggtatgttcttcatgctgggtacagtgtaaggcactccaaagtagataaaataaatagacacaggctctgccctaagaaagtttttgataatagggaaatgagacatagaaacaaaccactaaatggaaacctactgcaattgtttagaagaacagctaacaaacgctgggctcagtacaattcatcagggattttctaaacatcttctatgtgcatagatatagcttaggtgttattgaggagacaaaagaacataaaaatgcattcttcctgttaaagagcttagttaaggtgtccagatatgcataccagggactttctctgtctttcccttactccagacagaagtacagatggctcttggcgagcttaaaggagtatttatggggagtaatttcagagcttctgctgggcctttgcataggtaagagagtggccattaagatgtgtctgtcagttgagaaagcttttcactctaagtaatagagaaccagattaactgtgtctaaaacaccgaagacatttattgtcacaaagtctccaggttgttactcagctcatcagtgcaatcaaggtttcagaatttttctctttcccttctctcacctttggattgctagactttcatctgtcttttttatttttttgttttgttttttccctcatggtggcaaaatgaccattgcagccccaagcatcaaatctgtattcaaagcagccagtgctctgcgggcacactttctctttgttcctgttctttttatcaggaagcaatataacttccttaaaagtccaccaataaacctcccttatatcttgctggtcagaacttggcctcctgggcattgctgtgtgcaagggagactggaagactacaatgagacgtggaaaaggagtggggtgtgaggaaggcagtggatttgccaatccatcatgcctatcacaggaggcgtggctcagtcatatgtctttctttcataacaggcaggaggaccaaaggggcacaaaatgagaacagaaagttggaggaggggacccactgtgccattcaagctcttgtgagtcattagtttcatcgtaagagtttcttttcaaattgtggagcagttgggcaaatatttctttcccctattatattttagatggcactgtctaggatagttgttggctttggttaggagtgtgtgtgtgtgtgtgtgtatgagtcaacccattgggcaatttgaagaatcaaaacaaaacaaaccgacaaacagcctcaacccctggtactagagacatctgtgcatggatggccttggtgtatctaaccctgtggttccctttccatctccatccctctacttgttgcaaacgtagggaaaaccctgggacactgagaaacaggtggggcatgggtgatttgcggggagaggggcattctttcacaagatgtggtagagatagctgagccttgtgcaagagtaagactgattttctgatcacataaaatgcaaagactcagcattagaaagtctgatgcaaccttccctaccaggataaagtctaaacaccttaacctagcactaaaaaccctccaagatttggaccctgcagcttccagcctcaccagtctgccaacagagacagtcttcatctccacatcgccctcaccctgggttcctgtgtgtcttcacatctccctgtttttattcatgccccttcccgtgtccagagctcccttctgctccccgtccctatgctaagacagttcatctctccacaccctgctggacctttcctatccctaagcacagacctcagggcctgggcctcctggagccacccactcagcagagtcacagcagcctggggccaggacttcccttccaatgactttgccacagtttggctgcacagaaaggtctgtttcctgcatgccatgtctgtaagagtcttgactgtggcccaggtgcaagagacagacatccttttgttgtgatgagaggagtgattcctagccttgccacttcttagctgtgtgagcttgggtgaattattgaacctctctgtgcctatattttgtcatctataaaatgggcataacaatagcattttacacgtgtaggaagcccaatatggccctcttcaggctctcccattctgtaaattactcaagggttgcttccacaggacagggatggcttagaaagtcccagcgtcacttccacctgtctctcctttctgcttctgatgagggcacttcacagctggcctaggcttgcttccactgcaggcagggaagacagaaggcaaggaggccttctttgcccagctctctgggcagagccttgctgatgctccatgctaggtatccactttactgctccccttgttctgagagctgcctggttctgctcaacacaacagaagggctggtctggaaaggcctcctgccttagactcccactggcccagagccaggtctttcttctgagccagtgtcagacccccaggccctaatcacccttgccctgcctgtttctcagtgtcccaggctcttccctacatttgtgataagtagagggatggagatggaaaggaaccgtgggatgagataaacctatccgcgcaaagatctctccagcactaggaaatgaggctgttggttggtttattgtcttttaatttgattcttctaattgcccaatgggttgaatgcccaaagggcattcctctttggagacttctgtgtcctttctgtcctgtaggctaacttggtccaccccgacaggctgcctcgacatcagttcttaggatgaagatgttacaggggcaatcaatgggctctctgcccaatgcacagagaggcttttgagaaaggaaaagttttattgtgagtctactggcaaggagacaggaggaaacactcactatgtctctggagctgagggctgggttggattttataaacatagaataatgaggtgtgatctgattagatcttgcaatgaggtgatgacaggcagcatgatctgattggatcctacaatgcggtgatgccagtgtttgatctgattggatactggatcctactattcatgtctgcttctcaattcagttcgcactcctcagtcccagtgcttaggttacccatggtggttgcacagttggctcatctgggcatgctcaagttatgtgaccttccacttggggtccatggccactgaacaacagctcataactttgttacaagaaagttgagccagattggcctcgtgtggttccaaagatagtgggatctgtttctcccgctataaaatgagtaaatggcatgtagtcagtggttttgaaaaattatgttaatcactgcaaacctttacaaagcatttccaggcaattccatgatggaagctggattctctgggtcaagtagggcaggcatgggcaggggaggagacgtttccctccccagcctctctgccaaccgcccactggagatttgcttgggaagaaggttctcggaagcaggttctgcaccaggatgtgtgtgcagggacatcctgaggaagggcatccagggaactggtaagggagggggaaaaacatggaagagaaggaaaccactcaagggcgagagtttctgaagtccctcaaagggtagccacagcctgatcctgctgggggactttgcagtgttagttacaactcagtgtcatacacttctaggtaagggaccgcagctttcaagcctagattaggaatgacatccaaaccccatgggggaggtgagaatattcctcagcattttatactcaaagaggacagagcaaggcttgcagccttctgagggtggtctgcccaagatgagctgctggtgctggctcctggaagagaagacccactcaagtcatgggtcacacaggaaatgatgaaattgagtccccaaggaaatccgggcagagcaatgacatcatgtctctgtggggaaggtgcctgaaaccgagcagatgagggccctggggcagggggcacagggagaggtgggctgcctctccctggacgtccacttgtctcctttgccaagcacctaatcccaaggatctgcagagcaatggagggggcagccgagaggaagggcggacagcagagtgagaatagaggctgtgcccctgcagagcacttttccacggatgtgtttttctttcagactttatggttaatttatttatctgaccactcgggaagggaagaaaagtaccattttatgagcgcaggacaaaataaaaaacaatagcacatttaggtgccttaatttttctgttcctagagatttatttcattgtattatatttgacagcagtcaacaaacagcaaataggcagccaagtgcagttctcttagccgtaatggtttgtattctctgcacaaggcagagttttttttttttttttaccgcatacatcatttggaacttgatacattgatcccaaaaagtaatatacattacttttgttctcctgacataaaccagcaaaacaaatccagtggacggagtggggtggggccagacataagggtgtgactccctttgggaggggattgctgtgagtttagcacgtgtgtggggactacccgagaatgtcagggctggtgaggcgcaagcatgtgattaggtgagggcgttgtgtgagtgttcaactgtgcagtgtgatggggttcaggattgcttgtctgtgggtctagtgggaagcaaagtgatgttaacttttctagtagatatgagaatatgcagcctgggaagtctttgtgttcgggtgcatccaagcaccctgaatctgttaaagcttacatcaatgtcgaacaagtgttctggctttaagggagtggtcataatttgggcaacccttatgccccaagattgtcagcctggaagtcacatgggggccacatctccattcatattttaattcctcctgttccatgctctgggattccagtccctaccttagaactcctttggttatctcagcaagttcctagggtgctagtatttctcatgggtttctgcacccacaagtccttactgctgtcgttgcttggatccatgtggatgatgtcttctctgcacattgactcctctggcatctcagagactactcaccttccacagctaatgctgggctggccaccaggaagggaatgggtcctttcactaatgacctccaatgcagctgaaaccaggctgcaacttctggcaagacttgactgaggggatgacagcatcaggaaatgaagtcacagcatggcaagtagatgcggctgtctccatagcccacaggctcaggcccattctgccctaagaggctggttggtgcagcctgccaacttcctgccagtgtgtctccctgtgccaggaactggcttcttttgtcctgacagtggcaaatccacatgcatgactccatttttttggagtccaggttcagtttgcaaagaggccagagaagaaaactgttcttgggctaaggccagttgctgcttcttgacgccctctcttatgacggttgacagtgggtgagtccagttccttcaaaggaaagtcttcctcctcccacctccagcttccttgaattatggccacagaggatcaatggcatgagagtgacagagactacttgggagactgcattgtttgatctgtccccccgacaataataacacataacacgctagtcttcgtcctgcctggtcagggaggaaagctttgaccatctgctccctgcaattggagtgcccccagctatgatccaccagcaatcgcttatccctgccactcagccatttatcagtactgtcctgtctaaatcccaaaatacaaaagctgtactccccctagaggaacaaaaccttctgagattcggtgctggattgatcccaaataccaatttacttcccctgaacgaacctcgagctctgcttgcccaacaatggtgagttctgctttctccaaaacactgggagaggatgtgctttccattcacaccctgcagggccattcaggtggatttaccccaaaggaaagcagatggagtcttcttcataggcattttcaaatgtcttcctattctgagagagaaaacttatggaactattgagggaacagttattccaatgctttttttgttcccagggaaaactgaaacaaaccttgtaagtcttatcctgggaaccatgtgatgtgtcaattggcttaggcaggaatttaactttcagatggtatagagcagccacagtttggctggtactgtgcctggcctttgaggctacagagataaccgggaagggtcccagcccacagggtacgagtgccaaggagagcacgggtgaggtaggaggtgggatttgactttggaggcagggctcaggcactggaccaaattgatgactaagggctggggcagaagcagctttccataagacacacccactaatgtgccatgtcagtttaccattgccatggcaacacctggaagtttccacccttttccacagcaatgacccaatgacctagaagttacctccattttcctagaaatttctgcataggtcaccccttaatttgcacgtaattaaaagtaggtataaatatgagtgcagaactgcctctgagctgctgctctgggcacactgcctgtggggtagccctgcttcacatggagaagtacctctgctgctgctgtatactgcagcttcaataaaagttgctaagaccacctgctagcccttgaattcttttctaggtgaagccaagaaccctcctgggctaagctccagtgtggaggcttgcctgccttcattacaagcttatcctcagagaccccacagtgagtggcccctgacaaatgccagaaccaggatcccagagagtgacaaggaaagggggaggcagagatagaccctggctggggaggtagctgtttgtcatgaatcttatttattgctctctactttaggaaaaagaggtacagaacaagctgtctgtgtacgtcaaagaacttaaagggccaacaagtacctctgagtccagttgggagtgaaaagaacccaaacactgatcccacttcttttttttttttttttttttgagacagagttttgctcttgtcgcccaggctggagtgcagtggtgtgatctcggctcactgcaacatccgcctcccaagttcaagcgattctcctgcctcagcctcctgagtagctgggattacaggtgcccgccaccatgcccagttaatttttttgtatttttagaaaagacagggtttcaccatgttgggcaggctggtctcgaattcctgacctcaggtgatccacgtgccttgggctcccaaagtgctgggattacaggcatgagccaccacacctggcccccacttctttttaaacgagcatgtggaaatgaccagaacttcctttattctctgcaggtaccactagaggtcagctgtggagggttacagagcagctccaccacttcatcccacacagaccctgccaaccacggcagaatggagaggagccccctgaacctccacctagccgtgtgatctgctcagggttccgtgttttgggggaggggaaagaggccgcctctggggacactccacactctgttctttctgcctcacagggtctcagaagcttccgaatgatgccccaccacttgcaagaggggcaggtggtatggaaaggtctcttcacaggcacccctctgcatgtgcggccctcagccctgcggcaggacaccatgctgtccatgtcagtgaaaagaaaggggggccagtccacgctgtgttggaacacaggccccacacatgtgggcatgtgtttctgggaaccacatggtgtcaggcccatgctagccactatcaccacccaatctctgcctggtgccctggggcttcatttggaaggagaaagaacctgggctgtcagagccgagacaagccaagctatagggtaaggctgtgggccccagataagccaagctacagggcaaggctgtgggcccctggattcccacagaggagccaaacagccaagagacgagactttatttacaagtctctctgtcccaaacagcccaggcaaaatgtcacgggtgagttgaggagccgggaagtcactgctctgccctgagtttcttcaggtacttgctgggccagggacagacctggaatggggctcatggtgtgatcattttatgagttgtggacacacaaagagatctccatcaagtcaccttgggtcacctgggatattcacagaagtcccacaccaggctccataactgtactgggaccccaagtctccccctgcattcttctttgagaagtagaccctcagagggaaagcccaacagggtaggaagacccaggttcttccactgtcatgagtgcccacagccttaggtctctgggccataagaacatacgctacctggggcttctagcccatatcagagaggggactctgagtcccaaagtcagaggtttccgggaagaaaacattgtctgtcttttcaatagagacccagaagtctctgccctgggagaccccaggtgacagtctttcagaacccctgtgggtctggcattcatgaaacctgagacactgaagatgtaactttaatggtctccactaattcatggtctgcctttatgcacttaagaagagaactcttccttcttatgacacctccatttattcagaattagcatgtaaagtcctaaattaggcattccgcactcaggttctgacagagccattactttttatgctgagagagttgagttaattttaaattattgaggcccagcacctgagtgaagtgagcgtcttcacagagattgggcatctgtaggccctgctaacacagagacacaactggaatgaaacccatttctcctctgctgaccagatgcatatacacaatggacccagagagaggtctggcattgccattaattttgccagaatggattttgggcagaaccaggcttgggtctgcctctcaggaagcagaaggccgacttacaggtgcaatctgcttgcccgacccagttatggagtggaagggccttgccttccccagcaccagtctctaacagccacagtgctaggcgctgagactgtgtttccaaggagtccttagtggcagagacacttggggtgaatgagagtcacattatagttggacaggagaaaggaaccagagcctgttgatcctattctcagtgcatagcctcctccctggcacctgcctcccagcagggcagcagagagctgtccatggacttcagaaagttgcttctggaatctcccgaggcctcctcctcattgtatgcggccagcatcctttatagggtggtcactgcaggatacctgctgttctgtaaaatgtctgtgaccttccccaccacccagggtgcccccagtccccctcgttagattgagttaagatgagccttgcatctattggacagaaatcggcaacagaattggccagctggaacacgggcagctgcctccccagctgccaaggctgccgccaggatatgaggagcttgagcctccagccagcagatcccagagatgcctgtcttcagtgcagtcctcattcctggaggaccctaactccactggggcatctgtattccaggagaacccctctcctctcccagtagcccaagttttttccagagaattcctactctcgttggcccctcccacttcctcacaccacactgccaaaacagcagcactcccaattgtctgcctgtgttgtctccagggtcatagaaggtgggatgtgggaccattctaatcagatgctaaacagtttgaaatttgcaaataatcacactgttgacattaattgctatttttactatctgcaaaaatttgacccattgtccaagtaaacctaacagatatgtggattatatcagttggggctgccaaggtgacactgtcaagttgatttcatgtcattttaatgtcttctgtaggccctatactctctcaaccagaggtcctctggctagagtggaatggtcagagcttagaagcttgttctgcccatagaggcagttgttagcctcagacaaccggggacttccaggtgagaggactggaattgttgtctgtcctggaggctgggagagtccaaagtggggacagtgtggacagcagagccatgctctaggatcagcattctgcagactgcctggagcagcgcggagcctcctaggagcttaacttgatcaactttcagcctgagctggaactaaatccaatagagattggcttggagcaagagacagctggctgcctgggccctctggacagcggccccctgagagcggcaaatcagaaacaggcgacaggccaagcccagcctcaccctggtgtggaacacaaagcagacccactgcgcattgtggaagactcctgtgggtttctgctcctgaccttgagaacaggaagaacccaaggttcccactgcacctatcccaagaagtccatggtctggctcaggccagaagccaaaggcctcctggccaccctatgctgcaaaacactcacattcatctactgggaaacgggcagcatggcaccgaggagtgtcgtgttcagttttaaaatgccacaaataacagatttatagatttttctaaatacattattttagcttgacagcattaatcattcatgcttccttctttcatttttctacctgcaatggattattgaaacagaaaataacaacgagaaaggctagcagcagtatcaaaatgtcaagtttgtacttacagttgtatgggcccagacagggtcaagagccccaattatttgtgtatgtacacagtggtatgacacgaaaggttatgtcacctgcagctattttcctgcagatttaaataggactgatattcagctgtacagtgagctgctgacatggaacagaaaattgtaaaatactgcaaactctggtgtcagaacctaaaatatgaattgggtgattgtaaggtatagctgtgggcagtgccgcatgtcgtggtgcaaatccgctcaattactttgggttattcttggcctgcactttttcatttaaacataaggcaagagtgaaatcacaggactgggctgagggtaaaatgtcaggtctgtctactttgcaagatgccttctagagaccaagagtgcacacaccaaccagcctggacagagagaacaatatgcatgtgaatctacaagggtgacctggggcacccctcggctggtgaagttggatagatgatgggacaataaaggcctattatgcatattctgtaattttttgttttcttttagaatgtagccattatatggaaagacctgcaggaacgatttgccatttggtcaataaatgaaacgttgattttttaaaaaattaattttattaaaaaaaaaaaggcccggtgtggtggctcacgcctgtaatcccaacaatttgggaggctgaggtaggtggatctcctgaggtcaggagttcgagactagcctggttaacatggtgaaactttgtctctactaaaaatacaaaaattagtttggcatggtggcacgcacctttaatcccagctactcaggaggctgaggcaggagaatcacttgaacccaggaggtggaggttgcagtgagctgaaatcacaccagtgctctccagccttggcaacagagagagagagactgtctcaaaatcataataaattttttttaaagatggaatctcactatgatgcccagcttggtctcgaactcctggcctcaagcagtcttcccgccttggcctcccaaactgctgagattgcaggcatgagccattgtgcctggccatttttttttctgtcagtgaattccaaccctatgtcttcctcacaaggattctgtgagtatctgtggtcaatagacttatggtatcatacatgggaataaagccctagaaggtactacaatatcctttcgcagacagctcaatatctcatttgatcaccaccgccacccagtgagatatgttttagacaagacaaacaaaacaaaaataggataaacacagatatagataggacatggttgagaaaagaatcaaatgttaaatgccactcagctatcaattagcagagagggctccaccccacatgcagatttcagtgccccaggtgctgtggataacttgtgagagcaccccttctgtccctgcttcaaagggcagtgggtctgcataggctaactggtcctaggaatggcacagactcttgttcctggctttcctaccactggggctttgggaagcaactagcttgttttaggtcaagattttacggtttagcttaccagtagggaggataactcaaaaggcagtgatttccaattctaacatattttgtagtgccacaaaaatgccccctctagaccaacagagatagagagaagttgacttttggacctcagcctgcctagtagctctttatcccgatgccatcctatctctccatgcatggcacccctgttctcaacttcccatgtgttgggtgagccactctcctccagtgcttgagaacaccgctcacatctttgctagttctgtctcaacagtcttaaatggctttcctccccgcctctactttttcctttccaactatcaaatccttgctctctttttcctggctctgctcaagacctcacctccttcaggaatcttatcaggcaattcctcctgaattacttaggatgaatacagaaatcaaagtgaattgccgtggacctcagcagaagagagcacttatatcaggatgtgaaggatgcacaggtttctctaggaaacaaagaaaaaaagatattcctgggcttcaaagctggatgaagtgaatagataagaaggtatgttatatccacacaagaaatgaaggactgatacacgttataaaatggatggatcttgaaaacaagcatgttaagtgaaaaaaaaaagcaagttgcaaaagaacaagctaggtccatatattgtattaccctatttacacaaaatgtccaggcaaattcatacagacaaaaagtagattagtagttgccaggggttgaggggagaggagaatggggattgactgctaatgagtctgaattttctttttgaggtgatggaaatattctgaaattagttgtgattgttgcaaaactctgtgaatatactaaaaatcaccgcattgtagagttttaaaaggcacattttatggcatgtgaattatagctaaaaaatgatgggaacgggaaccagggacaagatgttcccaagagcatttcctctttttttctcatctgtttccttctctcttctgagcagcttgttggcttgctttgctccccaatccaaagtaaagaaaatggcctcccataactcccaaacttccattcctttgcacaagagactaatcagaatgagtcaggaatctcttagtcctgattccaggtttccaggagaaaagctaattggtccaaattgggtcaagtttctactcctggaccattctactgcagttaggcaatctggcttcttaatataattataggaagtaaggggaagaggtgcatccagaaaaggggtagaggaaggataggctatccactatatttagactatccaccgctgatattgatcttccaattacaattaaggtgttaaaacctgttatatagacatagatagacatgaacacatggataattctcttaactcttctgctaccctttagcacactttcctacatgctacttcttgaccctatctttctgtgacttttttttttgctatagatagtttcaaatatattaaattttaccctacgcaagggccactgtctttcttttgtctctatctctgcagcattagatgcatccctggagacttacactagagttcagcatggggagtgaggttccggtcggagatggttccagattgtatacaagcttatacaactttggaggatgtctttaagaatacattacatatacaaaattagaattggaagtaaatatttacttaggatgagaaaagaaatcgccaaaaatatacatttgaaacagctaacaagtatcacaaatatctcaggaaaaaaaaacatattttattaatcaatttttaaaattaattaacattctgacacatctcgatggtatatttttttcctaccgttttttcggcctgcattctctttgatcaacaattttataatgtcattttctatagtgggactgaaaagatccttcctctagcatgcataaaacatgcaaattcacactcagatgaatttgctgagtgacgtactgctacagatttgtgccttacaaacatatgaattctcatacattctgtttctcttattcctcatcaaaaaggaaaaggaagtatggtatgtttataattgtatgttttatgttaaatatattccttatgggagatgatttccattttgactatgcatcaataataacctattctacattaataattttacatgtctaatgactggaagaatttccatagactagcttctggtttcatacactgcaaaccattttaattctctacaaccctttcgaggtgccactggatacatgcatatgtctatagagactctggccttgcggtttcatggcttgcatgggggtagattgatatagaaggcaaatcatttctgcaagccatcaatatggcaagcatacaactacacacagaattgactacaaatacattaatgcatccctccaaactcaaaatgaacatatccacattcaacctgtctttacccagatcccaaaagtgtccatagcctctctaactccaactgacactagaagacttatggtggagaggaagtttgagtgggaagagacagtgttctcaacaaattgtagctaaaacctttgggatcttccaaagtacaggaccacattcctaaggtttagggcttaggaaggcacccatgcaggcaaaaggccatgaagatcaagctgtatcagtgtcaaggtaaaatgacttctttttatcagtgtaaatgttatgggatattagagaagggagagatgggtgcatttgctggatggattacaatggggtacatcttttcattttcttcttaaatgatattaagagctggggttcaaaatctaatagtcttagcccaatctcttgaagcacagtgttccaaataatggaagaggggatccatgtctcttgggtctccccataactccatgtctaccacctagtaggacctagcagatagatctctgcacagagatctgatagatgggaaatggatgagggctgcagctcttgctgtgaggatcaaacaaggtaatggatatggaagtgttttacaaatagaaaatttctgtagcaaaatatgtctaacaaaagagttcagtttggttgagatgctccctataccattgattgaggataatcgttagtatttttggaagacatcttccccacccaacaaatcaatttgaaagaggcacaccacttttaagaaagactaaagtctcttgccatcttctgttgtcttctgtcatcaggagattgtgaagaatgggtgggaaaaattcttaaaccatagtccaggttttatataacaccagtatttttagacatgtgcctgctatgaactgaagtgtattttgaaaacttaataaaaagcagatattaacccacaaatgtttcattttaaagtgagatgaatcttcttccctgccccatcaccaaccctctgctattctaagtctcttattctagccaggatttttatttgtttaaggtgacttagcaaggtatctatattgaagtaatgcatcagccaaatgggagaactgctttatcagatactgtgcaagtgaccaaagactcttcacagagaagcttaaataaaaaagagaatattcttattggattatataagttatataaatggaaactccagagttagaggctcaggcacagctgggttcagagacacatgtgatatcgctgggacctggtctctctcccactcagctctgctccgtctggtgccaaggtggttgccaagagctccagatctccatcttcttggttttgagtacatgggaaaacaagagaacttcgtcctcaaaagccacagcaaagttatcattgtgactctgagctctgataaggtcgtggacccatccctgaacctatcgctggggacttcaaagtgtgatgatgtcccattggtcaggactgagacatgagtctgccatggtgggaaaaggattgccagtcccaatctgaaaacacagatggagaatgggagaaaggcggtcctccaaaacacagatgctgggcaggatgtccaccagccaaccaccaacccagggctgaccccactccaagccagctttgaaacaattgttctatgacttagaaccaggactcggttctagcacactcactaaaaaaaaaaaaaggtctctgaatcatcccctatggtggtcaactggcaagagaaaggaatcacttcaacaaaggtttatcttaaccaatctacccaagcaaaggtgacagcaccaagtccccacatccattgtgtgtgtgtgtgtgtgtgtgtgtgtgtgtatgtgtgtagatatacagaatgtactttttcatagatggctgttaattacgattcttcaccaaggtggtataaacagatctctgccaatagaaacttttaattagatttattaattccagaatgtagttgaaatgtggtgaatattgattgtaatggcctctgttttaaatataattaattcacgatctgcataattgctcattacctgtatcttaattatggggcataaaacattgtttatcactaacatagtcctaatggggagaggagctcactctgataacttaggattcttggtatttttgttgaagagagcaatgagacatttcattttctttagagggagagagaaaaaaaatagaaagctgtgtctccaatgacaaccagtatgcacagacaacctgataaacacagggcatttatgattcttttatgactacattttctgacaagataaagtaaatactcttttgtgggactttacaactgcacaaggctaaagctactgtccaagaaaactgaaaaatttgagtataaatatactagtgtgtttaaggctggctcatgggcaatgaggatatcctagcagcttgacaattttcatataataccatgaagaatttcatggtttttcttcatcttactgctagtaccagcacaatacatcttttctagaaaaaaaaattatacaaatctatggcactttctgttttttcccatataccataaatcctaaagatagttcatgtgcctattaccgttagcatttttttttaagtccgagcaacaaaacctgaaatatgccacatatacaaaaaaaatcaggttgccaggaaatctgagttaggtgagattttagtggtttttgattctgtcaggtttttttgggggggaatttcttttacaaagactgtggtctgtggacatccatctgtgcctctttgtgagctcagcacttttccagtgggaaagagttgtgtacctgtttataggagcttgcaaatgtcatctatggtaactgacttcatttggttatagaaacaaagcaagattagcgagaagaagacacggtacttttgggccaccttttcctaatgctgcttagccctgtaggggaagctggggaaggtaaccagtaattttagatcatcttctcaaagtagggaactctttacaacagaatttctcacaagccctcatcattgacaatgcatttttgttcatattttttaatgcctgcatacatgtcacagaatactactacatgtccttaatcctaaaaccagttggctgccagtcacctgaacttgatgatgtagtcactgtaataatccaccaaataatgcatgacagtgagctatttactgaggacagtaagtggattggttttatctaaatgtacaaatctgtattaggtcccaagaagctctgaaaattgaaacaaaaactgaagaaaaaatggacagtcgggaaaagggagaaacatgttttgctgcactaaaagccagaaaaagaagccattgcatatttttagcaaaatgcttaaatttcatccatgtacatttcctctgtcttcagttaagtgtgagcgaccggttaatagtatctaggtttctgacaaaaaaagcaacaaaataggagctaattctggataaaggaaaacactatgttcaaagcaggtgctacttccctcatactgatcatcaaggaagaagcctgtaatttctctgaatagaaaatctctctttgtctagcccccagtaaatacatgctgacaaatattcacatgctgtctgaaaggtgcccagaaggtgcacgttttctgtctgggtccccagtgagcgaggagctccatgcctctggaaatagggctgttccctccgaaatgggaactcagtctggccagacccctaacattgtgaattactctgctgagctaccatgatagtgcactatggacgggctggtttaaacaaccaacatttattttctcacagttctggaggcctgaagtccaagatccaagtgtcagatgtgggcagagttggtttattctgaggcctctcagctgggcttgcagacggccaccttcttgccctgccttcaccctctgtacctgttggtgtcctaatcttctcttcttataaggacattgacaaatcagaataggacccaccctaacgacctcatcttaactgaattacctctttaaagatgcaaatacagtgacattctgagatactgggggttaagacatcaacatatgaattttggggggagggcacacatcagcccatcacaaatagtaacatgaaaaacgtaagcagaggtatggaaaactgctctgtcaattataaactattagataaatacaaaagaacgtccccacattccctcccagtgcccacactaaagggtgcattttgagcaatggttctcaatcgtgtgagttgttgtggtggtggggggggaagttttttaggggacacttggcaacatttggggacatttttggcatttctggttgtcacaggtggagggggttgctactggcacctagtgggttgaggccagaaatgctggtgctaaacaagccaccatgcacaggactgctctctgcaacaaaaattaccccatcgcagatgtcaatagtgccaatgctgaaaaaccccaatctagaaggatctgccccctttcctttccttttaaccttcttcttcttctttttaaatcagtgctctcactttcatggaataacctgcttcttgaaggcagaagagaatggcgtctgaaaaggaaaagggagcaaagcctcttccaggaggctgctcccaggagccgcagagcctgctagcggagctcctgtgtgacctgcaagccaccaccatgcccaggctgccttagtgcttctccaagatcatttctctgaagttagcgaatgctccacttttccctccaccagagttatgattgctttactcttcagttttctggaaagctcctctcagtgtccaaaaagctaataatgaaatggatgcctgtgaccaggggttacctccatgaaggccttggacagctggggaaataattctgctccctgcatccaaccacacaagcattaggcctgcctcatttcccctccccccttccatttcatcctctgttacatctaaatttagccctctccccagtgacccagggaaagatcaaagctctctttgcattcctgcaatctggagaggagggagcagaacaagtcctgagagtaaatggggcaggaaatggtagaagcagagaggggggaggcacacagggatctccaggggctggccgaccccagggatatccctggagaccagaaggcccagggaattgaaggggaggtcttgctcctccatgttctaggtctctggaagtgtcaggggggtgaatacctccttccagcagacagggctctactcagcccacatggtgagatcactggctgggccccttggctcaagcctcccacctcagggtcccttcaccccacttccccactcagcagattccctggggcctcccttccagtcctgatgagggaggagaaaccatttgtcttctgactagcagaaacagagcctctgtctcaggctgggttccctgggacgggctcaggtgttgagtagcaggcaggtttttggggagaaccccctgtgaggaatggaggaaggcaacaggggcagagggaaaagctgacagcagcgcctcttgagtgaggcctcggttggtccctggggcactctggggttgggtggggccttcagagctgttccaaatggaggcaagggggctgggcctttgtaccctatgagttcatcccagagagaggtgagccatgtgccctgttgcaagctggggcatccacagggggtcatctgggcagagcacctcactattgatactagcctctttgaccaatgcaatggagagttttaaactcagacaggtgctatccgttggccctcctctggccatctccccagataacaagtaagcatcagagggaaaatgcccgtttatggtttgactttcactgagaaattcactttataatcatatctttgagaagcaaaggttgcactgggaaggggccagggagggctgagttggggcaggccttccccgggcctcacacggatgggagactgcaggcctggagtgcaggcttggagggtgggagaccactgtggggcaagttgggcaggaatggaatggccacaaacctccccagacttgagtcaaatcgctcttttgtgaattttgtggttcaaataagtgttttctgttttcgttgttttttttttgagacggagtctctcactgttgcccaggctggagtgcagcggtgcgatctcagctcactacaagctccacctcccggttcacgccattctcctgcctcagcctcctgaatagctgggactacaggtgcccgccaccacgcccagctaattttctgtatttttagtagagacggggtttcaccatgttagccagaacggtctggatctcctgacctcatgatctgcccacctcgggctcccgaagtgctgggattacaggcatgagccacagcacccagctctgttttcctttttgtattttgagacaaggtcttgctctgtcacccaggctggagtgcagtgcgatcacggctcactacagcggtgacctcccaggctcaagcaatccccccttctcagactctccagtagctgggactacaggcataggtgggactacaacaccacactcagctaatttttaatttctattttttgtagggatgggggtctcactctgtttcccagcctggtctcaaacttttgggttcaagtgctcctcctgccttggcctcctgaagcgctgggatgacaggtgtgagccactgcacctggcccaaatagacattttaatgcaagtcatcgtgaagtggaataaagatagttaacaactatggttaagaggcaatgtgtgcttatcaaatgccgggccctgctgtgagcagtttctgtgtgtgacactcatttattctctctgtatcctataaggtagatatgactgttaatgtcttggtaccttaacttcccacctataaaattggcccaagcaacttgttggagcgacttaaccaagtaagcagtggagctgggctttggcagaggctgcctgttgttggctcctgcagattgggccactgggcggccctccctcccatgctgagaacaggctgaaggaggtcttttgactatgaccctgggattcaaattttcaacatccaagagtagggacaggaaccaatgtcctgttttgtaaaccaggaaacaagcttagggagtgtctcacaattactactggtacagaggccagatgccaggggctttttacagaaaatcatgctgccccatgctgggcactaacattcataggtcccttggacatctttgaatgaatgataaaaatgcaagtttctgttgctgtaaaatattgttcagtaatagtatattatgtattcatatcatagaattccaaagtgggagagggccttagaaaatattggtttcttctctatccttgcagagtgagaaactgaggcacagagaggagaagtcacttgcctaaagccacacggcagctaattacagagccaagattaggtttctggatttctgcctcttagtcacagtcctattcgggaagcaaactgttttggaggatggggaaagaggaggagattacttggctatcagtgaaattgatcaacagagtcaacatttaattaaaaaatatatcaaaacctttcttgataatgatcgacctgttacactggcacaattaaagtggtgattttattcactgagttactgccaactcctatgattttttttttgtaatacccttgtgataattcaattggaaatatgtggtaagatgcagaaatataatgccttttcttaggataactcatgccacagccaaccagggagttgatctgatgggtccattgcagaactgaggtctccttggtgccatcctatctccaatggctctagagggacacatcagggaccttagacagggcccatatttgaactggtgaaacgcatccccatgtgttcaacagcactgaggctgctgcacgttagaggtaattaggaataggcgctttttaagatttaaacgataacttttaaaaattaaattttcacttaaaatttcatgagacagaaggacagctactatgatataaatgcttgcatctcctctaaattcatatgttaaaattctaatccccagtgtggtagttgtaggaggtgacgcttttgaggggggtgattaggtcatgaaggtacagccccaatgaatgggatgagtgccctcacaagaggccccagagagctgccttgcccctttccccatatgaggacacagccaggaggtgccatctttgaatcagaaagcaggcccctgcagacaccaaatctgcctgtgcgtttatgttggacttcccagcctccaggactgtgaacaataaatttctgttgtttataaggcacctgacttacggtgttttgtaatagcagcctaaaaggactaagatgacaacacccccactccgccaacttcctcatcccactctgagaatcttccaaggatggacagcctacagctctccaggcagacaagctcacagaactactggtggtggctgcttctattctgatgagcaaaggcctaaagccatgtggatcttgcactttgaaagtgaaatcatgagcccttaatcactgaaaaacataattgattcccatttctctagttaggtgtcctggtacactaatgcctcaacacagtttgttggggggtggatgagaaagaattccatgatcaattaaatttggaaaatgctacatacaatattgccttcttggactcacatactaaaagctctgggatgttctgagtcaatgaatcaatttaatttttggttcatcattttccaatttatctgaccgcagaacgctgtcttcatgcatacctatgaaaaacgtgaagaacccattttcaaaaactcctaattgggcagaactagactgaaactgattattaatcaaaggaggcttaggcaatagaatgaacaatctgccaggggtcaaaagacccggattctggtctagactctttctttaattagctgtgtgactttggggaaatcacgttcttctgggccttggtttccttgcctataaaacaagagactgaaattagatcattccaaaggccccttacaggggcgatatacaatgatttttctgatttgtgaagactcatctgctggtaggctgtctactctctccttacctatcacagctcctgttggcacctgcagggcctgcagggtggcctggaatctgctccaggccgggggaagtgcattataatccttgaggacattcggataggattgttgtgtgttcctggcccaccataggctggtggctgtgccagtcagtctctctctctctctcagaactcttccctctgtgcagaatttcatggtaagtattatgggatgacgcaggagacctggaccctctaccctctgcccctaggattgtgagtgtcgaaggggaaataagccaggtccacacacagatgcaagtgatcacacgcagcagtgggtgtcgacaggccaggtgcttagcgagatcttagaggaagcttcctcctcaaggtctgggtcattgtagagacctcatggggcatggaggacttcacaaagccagaaagatttgttgaattcaggggttcaggggcctggatagaaatgaggatggtctcagtaatgctaggacaaaacaataccaagtatggttagcggctggtgagtctctctgcatgagcataagtaggcagaaggagtgggaaatcaggtggggccgggggctttagacagaagacagcagcctgtgaatgccaatgcaatcaggctctagggtcacacaggcagtgggtatccattcttcaggaaaaaagaaaactacaaaatactaaacataatactagaaatagaataattcaaacaaatatgataataaagtaaaagtaagctctttctgcctcttccagaagatcaaccaataagacaagttcccatagaggtgatttaatacactgtcatgtgcaatgtttaacatcagtaataataaatcgtaaagggggctaatgctttacatggtggagcatagaaagaggagtgagaggcttagatgaggaagggagatggaacctctgccctgtgaaagaccgcaaggggtagctgggcactcctgcgggagctttcctttcattctcataaaatgagaaacagtgagagtaaacaactgttacggtaaatacttaaacaatgattaaaagacaaaggctgctgacatcagtcttagtagagatgctactacatatgagttctaccgtcagagggcctagagccactctttggaggcacctgcttatttctcctgcctgtgtgcttccacttaggagtctagacaaccatgctcacagggtctgtctgcaggtcactggattgagcaaggactctcaaaatcaggaaagacttccttagacaccctctcttgggttctttctccttcttccctgtgttccaggttttgtgctcaaatctccagtgttcattcccagtgtcctccttccccgctatgcactgtctgctaaaggccttcaggagtgtctcatagtggtcatggtcactgttccactcacctggtgataagtagaaacctccggccaaagtctctgggcacaaaccccaaataccatcctgggctttctgttagaatgccaggtggatagagtgtgtgtgtgtgtgtgtatctgcaacaatgcctttgcttccaagtgacaggagctctaactggtaagaacaacaaaggggatgtattggctcatgtagtgggaaacccacttgtagagaggactttagggtcactgcaatgcttttctttctgcctctctattctggctgctaggacgtcagcttcattcaatggccgcttcctctctttgagagaaagatggaagccagcaaatcagctggagtatgttttcttccccaggaaggttgagattgtgagagagagagagagagagtgtgcttctgttttagaagagtgagaaagatccttttacagaagctccaggaaaaacctcttttcatatctcattggcctgaaatggaacccaaagtcattcctgaaccaatcactgtggctaagactagggggctgggcttcttttcttgtcttgccaatcagcacctaccaccaggtgctggggaattggtcaattcccagtacacatttagtacaaaagaaggagaggaaactctgcaggggaaaagaaaggattttcagtaaaagtttaaaatgggtgctggaaagtcaatcaggagctgtcccaggacaggagtttgaccctatgaagactactgcccaatcattcatcatttctgaaactcttcttatacatacaagcccttaactgggcccttgtgtatgtgcctagatcagttacgatgcttctggctgcaagtaacacaaaatcctgactccatctgtcttaaataaccagagaacgtggaatctcacattcggagtaaggacgtctaccggagacagcccaatgagctgctcagtagtcaacaatggcccaggttgttcccgtctctcttctctcttgtcctcaccatctgtttcatcctaagtcttctttcttttgtattttcgaggtgactgttgcatctctagacatgacaatccagaataacaaggagaaaccatctcttgtgatttttcccttggagagaggacattttccccaaagcacctgggctgaaatcctatctccaccactcagtggcaggtggcctcaagcagcatcaaagggataataatagtccttgaatccttatgaatatcagtggagtgatcccgctgaagtgctcaacaccagccctggtacactgttgttctcagaaacgaggagcttgacttgcctggtgtgtcctgctagttgaaggtgtttccatgctctggcatggattgtctccgagtatcccagtgttcagtacgcctctttcaggtgtctacagccaaagtcaaggtcagaaaatgaaagctttgggggcttctctcccttttgttgagccctttgatcaatctcaccctccacagttcctctacttattaaccctagggtggccactttgctctaatcatcatgtttgctgaaaggccccaatctgcagttccctgtctgaaaaaaaaaaaagaaaagaaaaaggaaggaaggaagaaagaaagaaagaaagaaagaaagaaagaagaaagaaggaaggaaggaaggaaggaaggaaagaaagagagagagaaagaaagaaagaaagaaagaaagaaagaaagaaagaaagaaagaaagaaagaaagaaaaaaaaaaaaaagacaggctaacaatatatgtgtcgggacctatttttagtgctttacaaatcagatcttccctcccggcctcctcctgtccctcaggactttcagatttactacttaaatatttataaactgttacaattatttattaaaggtttatgttgttattatatttagtgtggaatatgcatttcgtcctccaaaaataacaggactttccattaaacgacatctgttaatgatgcagtaaattgactcttaaagcaatagagaaagttctcttctcctttgacaaccctaagtacccttatttaaaagtagaggccctacctcactggaaaatacattacttctgactccccaaatgttactctatgcagatttaggaaatttgtagtgcttacacagagaaattttaccctcagctatcaccatctagtcaaaagcaacagatgccttcgtagttggtagcccttcctttcctccaaggcttctgttggtgcataaatgtgcacacacatgtgtgcatgtgtatgtctttgtgtgcatatgtgtgcacacacgtatgtgtaagagaagcccttgtctcagctcagatttatttgttcattcattcagtttaatccactctgtgttaggtgtcaaacttaaggaaatggataagaaacactgccctgagagattcacaggactaacagaagagcaaaaaataagtaataaaatatcaatggtacataaagaattattaagcagtgtagatgtacatgtgcaatgccatggaaacaaagaagcactaattttgtagagggatttttttttgatgtacatgtagctctatgtgtaatagcaaggcttaatttgagaagaattatctggcttttttcttggaatgggacttgccttccatcactaggttgctaacccatccatctgccagtgttacccagaccatggtctagcctggtggttctcacccaggggaggttttccttctagagacatctggcaatctctggaaccattttaggtgatgagagggtgctaccggcatttagtgggtagaggctagaaatacagctaagcacccagcaatggccaggacaacccacacaccaaagagttctctggccccaaatatcaggagtgtccaagttgaggttgagaaccactgtcttgctcaaaagggtcctgtgggggtgggagtcattctgaacaaggccagtgaaattggcctgagtttcttggaggagagctgagatttgacctggagagacagttaagggtcttaaaatgaccactgccccttcctcttgacttggtgatttaccatccagaaatctgcctacgaaaaattggtcagaatggctgataccgaattatgcacagagatgctccaagctacaagagaaacaggaacaaaaataataaagttaaaaacaacctaaatggccaacactataggttggctcaataaattaggatatatttttaagattttaaagatgtctgcaagtaactttaatgacatatacaatgcatgtaattttaaattcagtgaaaaggaatgtcccttccccaatctctctttttgtctcacacacacagaaaaaaggatggagagaaataaacctatgagttaatacctgttagtagatgttgggattagagatactatttgtttttaattttactttaatttttcggtattctctagattctcaaaaatcaacagaaacaattttcttagttgttttcattttttaaagattattttagactgggcacggtggctcacgcctgtaatcccagcactttgggaggccgaggtggttagatcacttgaggtcaggagtttgagactagcctggccatcatggcaaaaccgcgtgtctactaaaaatataaaaattagctgggcatggtggcaggcacctgtaatcccaactactcgggaggctgaggcaggagaaccacttgaacccaggaggcagaggttgcagtgagccaagatagtgccactgcactctagcctaggtgacagagtgaaactgtgggtctcaaaaataaataaataaataaataaaataaaaagataaaatgttggttattttcgaaagatggcacatcagtttagaagccaagagaccaggatactgggcttggctcatcccccagtagatgccatgatgtcagcgacccatagcccttcctcaccttcctcagtagatctgcttttgcacttggtaccaggggatgccaataacctccaccttcctgtctttcagagtggctctgagaagcccaggaaacaccacatgggaaaatgcaaagctgaataaatgaaatggttgaagatcgtacttctggtaggaagaagttgataaattcttcctatggggaggggagggtaaggaaggggaggggagggcagggcaggggacgggaggggaggggaggggagggatctggatctagcctggttttccctttgctcttggcaggtcttggggcacccaggagccaccatggggcattgcactttacagatgaatttccctacctttgcaggaggaaaagcagtggccctctggttacttggttgcctaggatttaaagctgggagtggactccacagtgcgtttttgtttgtggttggaatttttgagttatacactccctgggctgttagctgaaatattagtgcatcctcacaaataaaatcactccaggaaaagcgttgctagaatttccaacaaaggctgtctttgcccttccgcgtacttcctagatgggggttcttaagccactcctcggaatctgaatcctaccaagtgatgcctgccttctgcctgctaccctgggcccctggatctgctgtcctctggcacaggcatcatttgctccctggaagctggggaaccttgcttggcagtcactaggaaactagcttagaaaaacagcctccccggcacctgtgccagcaggcaggaatccacctgctttttccaaaagtgtttgcctgtagggagactgcctgaggcccacgtaaattcagaaatttctggggtttggcttagcaggcccagagggccccggaagacactgagtgatttccctctgtggcgtccgtgagagtcagtgtcactgctggtgagtccatttttcccactcagagagttggggcaccccctaaataattgaagtattagtatcagtttctttccccttctgcaggcactcccagaggtctgccgttttctttgcaagaacagttggcattaaatatgctgggtgtcagtgcagcagttaggtggttaattttgactgaatattatgctatataaccacttggcatttaacttgaaaaatggctttctgcttcacctgtcagcatacccagttctcatcaaataagtgagtgagaaaaatttttaaatttcaatttcctgatgctattagacactacttcttccatacttaaacagtttagcagtgcatgtgcaggtttttgtattcagaccatgcctgagactacatgctattacaatagcttttttgtttaaagggtaaagagatgcatggatctttatcttgaggttaggaaaatgtattgcaggaacacggccaatcaggttctgaataactttgaaacatggtgccatcaccccagtgtagtacaaggaattccagtgcctacagtagaggatttgagagtgtcagaagaaagccttagaaatgaagtaaatgtgcagagtaatcccgcatggtacttcagggggaaattgatcactcaggttagcattaatctatttttactgtttcttttgtcaattataattcagtaaaccatgccaaggacttacattcatgaactctctatgtttaagattaaaaccccaggctcatccacttatgtgaattagacatctccagttgttcgtagttcaaacaggttgattagtgtcacctcattttgtttatacatcccgaaaatgaaaagccggcagagggaagatgacagtatttgatttctatgtctcagaaccactttgtcataactcatttttatggtggatgtgttgtgaacaggatgggaaacgtgccttgtttgtttaagaaagggtcaacaagctatggcctgttggccaaattcagcctgcctcttctctggcctgtttctgtaaataaagtattattcggacagaaccacacacacttatttatcggtttatctgtggctgttttcaatctgcagagttgagttgtcccaacagacacagtatgactcataaagcgttcttatcggccctttacagaaaaagttgtctccctgtaatttcaagcttcaaatgctcattttcttccttttgtgattccaggcctaatttttccatatctttagagggcacatttctagaaagagtgaatggcttgagaagttttgtacttttgaagaggttttttttttttcttcacttaggctggatgagggggatgtgaaatcattctgttttacagataagaagactgaggtacagcagggttcagtgacctgttacaggccacatagctgggaataaaaagacaaactccattcttcatgggaactgtggggattaaatacatcagtaaatgtaaatgggttgaaaaaatgttcccagcatagagcaaatttgcaatccttgctaaatatgattattccctttattttcattgttccagggccctcaccctggtataccaggcaaccaggaagaagggatgcctgctgctgtaagcctgtgccagcaacacagagacccaggccttcagcccaagcggggctctgtgcctccatcggaaacatgaaccagatttccttgtaatgggctccatatttaggcccagcagccttagatgtctggccaataggaaagctatgtccttcctgcacaatttcagccctaagaatctgtgactctccctccctggaggcctagagaacaagaggagggagggcttgaaatcaataaatggattgcacacctgcagggctctgccatttgtcatctgtgagctacgcagccattctggggcttacgctatcctgagctgcgtgtgtttccatggtctcccattatgctccactttgacccctcaaaatattgtttcaacttccaggaggctggatgatggggagagagaggcaaagagagagggagggagcaagggagttggcagaatgagagagggagcatgtccaaaaatgccggctccagccaactgtatcagatgccagctgccaataccaccctggtccctctgaggtcagccaggtagctggagcccttccttgccttccaggcaaacaggctgctactccaagggaaaacagccctcaaatgcagccctgctcggcttctcagaaggctagggaggagaaaggggattgaattaaccaagatatccaacatatcgtctccagggtgaagtagaaaatcaacagcatgacctttaaggccactcactcattcactccaagataaattctataggtgcccatggtgtgctggggaggagaggggaggggaacggacagctcctacccctaggagctttgtgtcacccatgtcatcagccgaagtgctggcttaatagacggaacttgttctaaaggtatgagaagagtaaattggagatggtaattgcaggaagtgatggcagagggaagaaagaggtggtgttttaggagtagggtctggagctgttcccataaactagggccatggaggaagcggctgcccatgagggttgtgaaaccacagaggtgatgccgctacaggcagatatgccacccctccacaagcccagactctcaggggtactgcagacagttatctgggctcattccctaaggccccttttaacgagagagtctcaagacagcggggctgggagcctgtgaggcaggaagaaagttccagctaaaaagacaatccccattagttcagctgggactctcaagaagatgagcgctttcctaaatgcaatgaaggcaaggaataagaaggatgggctttcctcccaaggctgctgggagctcacttggtgaatatgaattggtctccttgccaggcggggcctcagctccccgacctgtagcatgggatgactgggttggctcaaaggtgttacccatccatgttatcaaagagaacagttttaaagctcaccacttagaagatggagctttagagaaaagacagtacccaaggactctcaggagcatcgtgcatggggcctgatatggcaccacagcagctggggtccagagactctggaactgagggctgagcctgagagacgtggtgtgagtgtgagtgaacaacgcattggcacggtaggtgcgtgtttatgcatgacagtcttcaaaccctgcttctgcagaaagcacagtgaccatagcagatactgagttctgtcgtggtagggacctgcgccaccagggcctcccttcgtccccagcagcctggagcagggcctgctgcgtccctccccagccctcacccctcccagccagttaagagagtctccagccaggaactgatttgtggatgtgcctcaaggtccgccagtgtcacagtcccgtgtgatttatcgcctgctccacacctcacactttctgttgtgtgctaatgccccgtccttcatatctttctttaatcatgagagagtaattgtagatatttaaacacttgagtttcctgcaggaatttcgagactgggttttataggccttttataacagaacaaatcacagtttggatgaaattctgggaattctcttgcaggataatcatgttcagattgcctccctactgctagcttaatgtggctgtccaagtttgggatttactggggagccaatttgttttaagaaattaacaaaaccgatacctaagtaccgcagtgaacataaagtttttattcattttggtgaaagggaaaaaaaatacccaacattctgctactcacaaaacagctcttgaaaatcatctttatgaaattgaatctctctccccaaatgattccccgatgctaagcgggatggccttgtaataatcactcccttgtattcgtgcgttaaccggttcaaacttcacaggctttgcccaacccaagggtctcatggcaccggctttatactttttaaaattttatttatttatatttttatagaatgcagggagccacacagatgagagagaattctcaagtggggaaagtcatatgtggactgtgagatttagacacaaaaaaggaatgtatctctcacaccccacaccccacacatacacaaagtagatttttttttttccaaaaatgtggtctggaaaaaggaaggaagaaggatgcctgtcatggagctggatgtgtgaaaacctctttgaaaagcaatgacatttcctccttgggggacctcatcttccctttgctcctacctggtgctgaacacaggaagttcgtgctctcccttcaccatcacagctgcttgggaaataaaccacatttaaatcaacccctttgtatctgccagcagctgctaggcctctgaaggaatctctcctctcaattcccttttggtgaaagaaagggaatttgcacccagacaggggaggctccctgctgggcacgagctgactgagtgccctggcccagggcaggtgtgggtgtacggaggggtttggggaagggccctgagattccatttacccaaagggtattatgactctaaggtgccttcttagtctgcctggagagtggggagccaccatgggagtccgagaccacggacaggacaacagaaactcactgctggggctcattccctttgggcagccccaggcagttacaaccaggatgactgcgacgctgtggaaggagcttgcagccagtggcccttctgcgtgggcctctgtgcggagcatgggcagaaagaaaggaaccaacgtactcagcaaacagtgctcggtgtatctgctgccaggcccagtgctgaaccctccaggtgagacaactcgataagacactactgccccgccatttgcacctggggcatgcgtcacaggtgtcccaagacctgcatggattgatttgctctctctaggtaaggacactccttaggattgatgccactgtccaacctggcctcctgaatatgcaagacagagtgtgccagggaacaaagttgccacatttcccacatggtccagccctgggtaaggcatttcctgggcagtgcaggcctctatggccctgttcacctcattccctggagtcttgtaccctacacacacgccctactgttccctctgctgcctgggactcccagccgtctccaccagccagggcctcaccgagggtccatgcagatcttagctattcacaccggatgctcctggagccaggatgcggcccttcagaccttggccatggtcctgtgtggcccatagttgtggcaggcttccacatctattctttcctagctggtgccaggtcccagccctgaggtctggggtagaggctccctgggctgccctggttgtgacacagatggctctgaatgtgcttggctttccagagcctctgcggcacctgtgctctggtcctgcctggccctgtaggctgcgacttccccaggaggcccagctcactgttggaacctacttgctacctgatagcctttactgcagttctagcctagaacctagaaccttgacggtatcaagacagtcagatagtggtgaaatatgaggcagggcagctgtttgctccacgtgggtgtggggctccagccggggcctcagcatggctgtttctccctcaagtcgcctcctcggtgccccctgccgacccgttgaactctccacggccttgagctgcacccacctcccttaacaggcttgcagggtcctcaccaaagcacagggctgcccctctggagggaaaaagcctcaggtggtgctgctcctgccttcctgtgaagtctttccagtctccccacaagcatgggttgagcacctactgtctcccttcacaaggctaagagctggggatacagcagagactagacaaagtccgtgctctcctagagagtagagctcagtagcggtgacagatcacccagaaaaaggcaaatgaagatcattttccacagtgagaagggccagaaatgaaataaaacagggtgatcaggatgggatctgggggtgcaggtgcccacattagacatcatagtcacggtgagtctctctgacacttgaggaggtgacccttacaaagtgtcaactaaggccagtgctcctgcctgtaattccagtgctttgggaggccgaggtaggaggatcacttgagcccaggagttcgagaccaggctgggcagcacagcaagacctcatatctacaaaaaatttaaaaaattagccaggcgtggtggcacacacctgtagtgccagctactcagcaggctgaggcaggaggctcacttgagaccaggaggtcgaggctgcagtgaaccgtgatggtgccactgcactccagcctggacgacatagcgaaatcctatctctaaaagaataaataaaataaaaatttaaaaagtggtgactcagtgagcggggcagccagcatgcaaggattggtgggagggaattttgggcagaggaaaccgcaacagcaaaggctgggaagtgggacagagcttgcctagggtggccggggctttagggtacgaggggaagagtctgcccactgaggcctccgagtctgagagggaggcaggggccagatcacagggcacagccatcaaggtgaggagaagtcgaggctgggctccatcgtcctgccctgctcctggctgacgtgaacccgtcacagcctggaaaacacacacttgacacaagcctgtgccagcagggattaggagaacattgttgtcttagaagaatacgtttttaattaacaggttttatttaccaccgtgcgttctctcttgctcacatggccctgttaaagagcattttaaattatcagcttttatttatcacaagaaagtctccccagtacgggcactttcctgttgttccccatgctggcctgagcgagcagggagatggggagaccaggagttcaaccctgtcctctgcaggcctggccccagccttgcagttggacacacatggccttctcctctcctctttcctggccgctgacaccggggcaggtgacagtcaccttttctgatgtggtttgcccaagcagtgtctgaattaaatctcgccagttgaagcctgccagggtgctgctggtccagagagctcactggggctgggcaggaaacattgtggcttttgcaccctggctaattccattgcgcagctttcaatgccactctatttaaatccctgtcagaaagcccttaaggacagccagttttatttactgtcaatgtaaccactcctttggttgatactggcctaaacacctccaggaaagaaagcccgggctcatcaactggacctccatcctgccgaaggaacaaaggaggcttcctcctctccttggcatatgtgcatattaaaaaatttattgaacctattttaatatccttcgactaatgggagagttttaagacctttctaagtatagtagtagtaaatcctgctgcgtatttcacccaaatatccaaaataaaaatacctttgattgagagaggcgagtcgcccactggggcccataccttcagtttcagtagctcagttcaacatcaaaaacaacaacaacaacaacaaaaaccacattgtagcaatcagccctctaataagcctctaactcggtttctaccttatcccaaaggtataggaaatagcactgctttttttaaaatatcaagaaaacatcatttgctctaaaatgtccctaaaagcaggtctaaattgccaataaaggctaggtaattgtatcagcatggatcagaaagcatttctcaggcccgatgaaagagtttgcagggctgaaggactccaaagctgctgcccaatcccccccacgcttagtcaacagcccgcaccagcagttcgaagggagattttcagcacaatgcaatttcccttttaaagccaaacgcctctctactccccccattctcattttgttctaatttgttaaacttaatttcttctgaggagttgtctggaagctcaggtcaaatcagagaaactttctggctgtttgtttttgaaaagcagaacgttctccttcctaagcctctgggtctgaattacttaattattctctccttttcctcctcgtccaggtgaatgatatatgcactgaaaaagcaaactgcatgggtggcttgtcttcttaaccacatcaccagcctcgctctccaccttagagcactataatcacttgactagcaaacacatatacagtataaatatttaagaaaaagtaaattctattaagccactgtgtgatagatgcagtggtaggtacttatctttgaaatattaaactctagacatttatatccatacaaaaaagagtttcctgccatttgatgagaattatgtgcctggcactaataaaatattaaactccaatttaaaagataagtatcttatccacttttttcataataaaacattttacagtgctcaagaaagccaatatgcatcagaatttccatacaatactgtatttacaaactttcataaaagttttgtgtctgcatttatcagtggctggtttcacactagcatcctgatcattctccctaatgatacggtgcatttcaataatgcatgatggaaggtgtacaaacagcgctttgtttttgtgtatggtaattccatatttttggttagtggttctccctggcaattaattaaatggaggtggtcactaagattgcattatcccttttggtccccattatataaattaatgtcaaactgatgcaatgtttcatgtttaaaataacagatacaagtgttaaaaattatagcctgcagttttcctatttgacaatgcattattttcagctgcaaatgtcagtttctaacccctgccaagaatattgtggcgaggcaatgagtaataagtgttagttatcaaatttagtgtcttttgaaatttgcccgtgttgccagggtgggggtggggaagcagtcgatgcacttgtgtaaatttatggaagctccacttccagagccctgtgggaaaggaaaaggattctagcaggcagctagactttccacgacatcagctgcctccagccacagcacgcaggtcctgacggaggcctgcgagggccagccttgggtgtggtcccagtgtctcttggcctggggatagttaagaggtgagaacagctgaaacgtatatgacgttcccaaagggtaaaacattttcaaagggcctcacctaattggacctggactgcataagccccagtcttttcattaaaacctgatgtcaaaagctgcctatttgaaacctcctttgcctcggatgttgcgggaactgggctttggccatggatgggatgttcctgagccctcaagaccattttggtctctgggagtgggattctcccctgacccctggagatcggccttgacaacaggatttctgttagcagcctccttctcttacctctttgttttgatagatgtcaaaagacagttctgccttgaaaaatgtaattactcaagaggatgataggaggtaaaaaactatatgagaggtaagttgcatgatgttttaaaataaacaaatatcaccttgggcacaaatcccctatgcacccccacttaggtttggggttgagaagtggaaggtgcagcccaagtctgcgccagctgactcctgagcagataaaatatttagattgtgtgatacgtgtagagcaagacaaactaaatggttctaacatctagagacactttcatttctcagggcaatgccgggtaccccaaaacagtgttccactggaagagacctttgctctttgtgaaacttggtcaccatcagagaaggggtgggtgggcatgcctgtcccctcctcagaccaactgaagcttggccagaggtgtcctgtgaacatcgcccattccatgccacagagaaaagtactgtcaaattttaacagagagcagaggcgtctctccacagagatttttaaattaataaacaccttgtagccaaagaaatagctgatttgcaggtcttctttctgttgggcatacgtccggatgcagtagatgaaaatatgttttatattatcctgggaatgttatcgtaagtggttgcttttgcaggtgtgagggaccgcggctaacagtgactggtgactgttgtatcgtttggccacagacatcagctaaatcctgaataagaactctttccgtttcttccagaagatgagcagtggtagtgttccttatttctgtaaattactgtagaaacaataggctgcaattatcatcacgtttgaaaagcatccactaattacactcaggataaacggcacttaatacctatgatatctattgtgagcatatcagtgtgatgccctagcctgcactgatacttttatcttctaatatttggaagaaataattgctctgaaaagagtaccttaaaagcttggcctgctgggcttctcttcagcagctgtttcacgggctggggtctgaggggcacgactcagcctggactcctttattctggggcagagaccgcagagttctgcctcggacactcaacactcactacctgtgtgatctcaggtgagtttcctaacctctctgctgtttccttcaacataaaatgcggatgagaataaggctcgctttgtagggttgttaggaggatgaaatgcatcaatacattgaaagcatttaaattgtccttcctgtgtatgatttcaaggttccaaaacttagtcctggaaagttttcctaaagagcttcacacctgtgatccgtgaagctgaaattagaatgttgttctcctggtcttaccaagagacctaaatgaaacaaatcacataaaaaggagcattgaagagtgaatggcatgcaaaaaaagatactgataacaataacaccatatcattgaaagcacagccctaatttatttattatttcatgcccgctgttccctcatctccagcctttgtctaagatgagaccttgggactcatctaaaggcttttatttgacgctttccttgcctctcatctcacacatggaaaaaccctcctaacataactgactattggcagcttaactgaaaccctcccttggttctccattgccacaggctcaagttcaagctcctagtcttcattcttccacccctgactgtctctccagcctcatctctacaaaaaactcctctttctccacatactccagccagatggaaccttttgtagttctttgaatatgccgtggtctccctccattcttccactccacttttcgcagagcattgaatagttacaggcaaggactcaagaagtagactccccgggttcaaacccttgccgaggtcttccagtgagcaccatgggagccccagagccaatcgatttccacttggagctctaagcttggagaagctgtgtgaacttgaataagttgattacctctctgagccttggctttcccatcgataatatgggatatttatctcatacagttgtaatgaagattaattggttaaaatataaaaaatgctaggggcattgggtgactttgttattaagaaagggtaagtcataggcaagtttcaaagatctgtctcctgagatgggggagaggcctctttttttttttttctacatgtggattctaagaggtttaggttcaagccccctctttcccaagaagactctttagttctccatcccacatcaatttatgctttccccaaatcctctctcccactgtgccatgctttagctttgcatgggtcagtatttggtcatgacctagaattatttcagtcttatctctgccagccagtcagatgctggaagaagggagtctcgtcccagctctgccccatgaccagggctgagcacacaatgaacttggccgtggactgattgacacaccaaagtcccgccaagccagccctttgtcccatgggatggcacacacaatggccaactcctccaaggatcctcctcacacttcctagcctagttcacatcatctctgttccctgtgcccaagccagccaggtgcctggccaaataattacataatggggctggagggagatggagacacaagacagccaggggaagggctaaaccccagccctgctgccaaatcctcccattccaggagtccaccttgacatccccagatgatcatgtctcataggatgtcatcctattagcactttaaggaggcagagaagcgtgaagccaaactggtacttgaaatgtccataattgaccttttaaatcactaatgtgtcagataacctggtacgtgattgtagagttgttttggatgctgttctggtcatgttcctttttctaatagaaaaaaaggtggagggaagtatggttctctataatatgactcttagttaagaaaagttacaagaagaagaaaaggaggagagaaggaggagaaaggagaagaaagaaggagcaggaggacaaggagaaggaggaggaggaggaggaagagattaaagaaaaggaaggaaagaaaagaaggaaggaaggaaggagggagggagggaaggaaggaggaaaggaagggaaaggaaaggaaaggaaaggaaagggaaagaaaggaaagttaagttaagttgaggtctcctgcctggctctctgggacccctgtgtggacaaggaagaactgccagctcactgtcctccttctaacttgaagctaatctcatggaaaatacgatgcctcaaatctgaattatttgttctgtgtgtcagggacagggtgggtggcttctgtctgcaatttaaggtaaaattaacgcatatgcttctccagtattttcacagtataagactcccagccaaatgtgagtgtttccacacacttccttcttgagaagacagatttgcatatgcattaaggccattttatcagaatgcacacacagaggaatgacacatctcactgacagcgcccgggtgacagataactccacacaaaacatacatttgaaaggaaaataggaggaggaatagaattaaaggccggtgtgagagtggcatcgtgttttgagtgaggcagcacagattggattgtttgattcacttcccggctctgcgtgagtcaggtggcgacaggtgctcctccaactacctgagctccccgggaaggtggggggtggggggcggatgctgctgggccccgcagccttaatactgcatgacctcatcaccgaggtacacagtgagcctcttccctgtggcagctgaggtctggcccctgaccacctcactatctcacctccctcacctgtaactttgctccggtgctctggccacgtgggcagggcctctggacatgcagattccactgccccaaaagctctttctgcagactgtcctgtgggggcccagagaagctcatgccagttaagctacgaggaaacgcacttgctgggtcctgttagtgccagggcaggtagagggttcaggtggggagtggagactggctggcagtcaggaagcatttctatgctgacatttcagatgaagacatacagaactctcaggagctcctgaatctccaagacccaggaatttcttgtgctctcctcttattctcagtaaatatttactttcatatgaatatttttctttttattttgttaattttttttttatagacaagatctcatgctgtcgcccaggctggagtgcagtggtgtgatcacagctcactgcattcttgaagacccaggctcaagcaatcctcctgcctcagcctcccgagtagctgggactacaggcatgctaccacgactggtgaatttttgtattttattttttgtagagtcagagtttcactatgtttcccaggccggtcttgaactcctggcctcaaacgatcctcccaccccagcctctcaaagtgctgaaattacagatataagccaccatgactggcctataaatatctttctcaaaaggattccacaaatcgtaaaagcctcaggacccacaaatcattgatctgtcttccacaagcttctttctgttaatttcacacaaatattaccttctcctatgggccttttgcaatatcgctcccatctctgtatcactccaccctttaccctggcttgtagaaattaactcttctcaaaattttgttagttcattcattcatccatgcactcatttgagtttttgttcttcatctgttctacatctagactctccatgaccacaggcacctgctctgttcactcacctgcatatctctgcatctagaacagctcagggtaggtgtggagtgaatggtgattgcatgagcgaatggctgccaagtctacccatggcttgcccatcctctggatacatcatctacttctctggaactgcaagctttctcatgaaatacgaacggctaccctagatgtattaagttgctcaacccatgtcttctatgcctcacaaactgggctgggtccaggggtctagcaaagaacaagacagatgtagcctctgtcttaatggatagtgcagtttgtgaaagacagacattgaacagaaaatcacacaatcattcagtgaaagttgagatgggatcattggaaggcttatgtgagagagcagcagcatctctctgtctgctgagacacaagcaaatgcttccaaagctctgtccacatctagcatgcatttctggtgctgctcatcaaccaccaatgagaggctgggttgtgccatggtgtctagaagcaccatgtcctttggtgttcctgaggctttcagcctctctcttccctgaaagctggcatggggaggaagggattttctgccacccctttaccactccccaacatacatatctctaagtctaagggtccctggagcccccaaatcctgacagccatgttaccaaatgaggcacttcttctctcacttgccagctgagtgactgcttctggtgattaagaagagtaggagtgaacagcagagggtgtggccgatgtggagtaaacttacttgatagaaaccaacttggatagggtcttcgcattctaagcatttgggaaattcaagttgaaaacttaaacataggcaacatctaaaccagggttgtccaatcttttggcttccctcagccacattggaagaagaagaattgtgttggtccacacataaaatacactaatgctaacggctgctgatgagctttaaacaaatttgcaaaaaaaaaatctcataatattttaggaaagtttacgaatttgtgttgggtggcattcaaaaccatcctgggccacgggttcatctaaaccttccctttttattagatttctgtatgatacatgtagataaccaatttgcatttgtttttttccaaagcactgaatgagctgttctggctgtcttctgttttataagtctgtgcacctgagttccttgggaaccctcttgcagagtttcaccacctttattccttcaaagccaccaatgccctgaagagcagcagctcagccacctgggccaggtccgtgtgctgatgaaggtggtggctggagtgtgatacccataataaaccctcagccaacctttgccggatgctgagatgctgctgttagttgtgcatgcacctgctaggcccactcatgtactgtccccaagtcactactgtagagcaaacaatgcaacttgtgtgttggggattgacctcagcaaattataagcaattaaccaaatttgccctaccattaatcatattattctgcattgccgattcatatgaccccaaaattgccaactcttttcagctgttagagatgtatatccaggaacaaatgactgccttcaattctgtctccatcctgttcttcgagtcagcacccagctgaggcacgtggctaacagtgggagaacaagaattaccatagatctgccaaggatcctttgagagaggacaaaatagctgaatgcaattaagcctattgtcagtggctaaggtacttggaatgacaggtgtctttgaagtgcaaggtattagcgctgtttgttgctaaattcccaacctagaactctatcattttgctaagaaattgcagcaaactcaatttttttctatcaagtgtttccctgggtgctaagtctatcactgttataatatattaattttttttcctttggtgacattgatgatggggtacgtcttcactctctctcacctggtaccttctccgtgtctttaggagagaatttggaattgctggaatattcttggccatccttcatttggaatttatgtggtaatttcagtgaaaccgagaccttgtgcagcagttttcatctttttcaaggctgcctctctttctcgagaagctggagagtttccaattattccttctggtctctttggatgtgaattgtaacagatcagctgagagtcgcagttcaacattgttaagcttatcaatataaatataatgttaaaccccttttagataattggagctatgtgtgaaaatgtgaccaatttgtgcataaattggtcctacacttcttcctggcaaagacagagagagagggaaagagagaccaaccatatgtgaagttggtttgcttcttctcggggactttccacaccttgaattcttgatctggctttgtggctgctgacagttggaaacctgcacaggttatgccaaaaccataaggtcctttgcccttttgaaccaaattcttctgtcttagaggctgcacggcgagtatcaacaaggcacttgcatatcacaccaatgggagggttgcagacagtcttgagaattaaacgtctctgcttggacaattaccaaattcaaagaaccaaatggagagactgacgcccatggagggggaagggaggggtgccgagggaaatcctggaactaactcatcccgcttggaaaccttgctgtcacttcgggatcctggaaaagctcatattctcctcctggcttctccttactgtgtgtgtttggggtggggaggagggtaggatggagggtgcgctagttcatttttccaggcgtaagtcctccagagagagttaggaggcctgagataattattctaaaactgcccacagcattttacagcttaaggcgagtgtttaacaaaatcagttcctcccaacaatactgagctaaatattattatacaatctctaccgataaggaagttgaggttctcagaagattaaaactaaaaacaaaaagaaacaaagaaggctattcaaggatacttggaaccgcttctgaagttcactctggagtttgtaaatttttacgcagtgcgtttccttacctgtaacaaagctgaaatgagaccataattaaggaagaaagtcgctgaggcgctgcagcctgtgacgtcatcaagcaggcttctggctggcctgaacgtggaggtggcaccgtgtttccatgaattgccagcccaagatgtccctggggctggaggcattcagtcaggagcaaaggctccacccctcatctgtttactgctagactgcctttcaggatgcagaatgcaagactcacccagatattacagaggcctgggggaaagacagacaggacctctccagcaactgctgtctcagataccgaaaggctctacgaggccatggtcttcgcgcagaaccaagctttgcaagaaagcagaattctcatttcctttactccggctcacccagaaaacagagtctacctgcaagccctccaggtttgacctctgactttagggatgctcagggtgggaggacatatgacagcctccccaaatccaaaagatgccctagctgggtaccatggctgacacctgtgatcccagcactttgggaggcagaggcaggaggactgcttgaacctagaagtttgagaccaacctgggcaacatggtgagacttcatttctactaaaaatacaaaaaaaagtaatcaggcattatggcatgcacctgtagtcccagctacttcagaggctgaggtgggagtatagcttgagcacaggaggttgaggctgcagtggtcatgccactgcactccagcttgagcatggaagtgacagcttgcctcaaaaaaaaaaaaaaaaaaaaaaggtgccccacgatctcatcttttgccctggaaagagagatgctttctgggaaaaatcaaagatatctgtttaaactcatggttatatttccaaatggaccccaggatgtaatgatcacatgtattttctcgactcttcaccttttccctctaacttggggaaaagtaagtgcataaaggggtttcttgggcatcacttgctctgttaaagcagcatgatgagttaagcagacatgaatcagaaaacatatggacccaattttggtttaaaaattaataggaaaacacattctcatcaaactcaaaacaatgaaaaatattttttaaggaggcaaaaaatccaaaatacagctgggtttgcccactccacacagattcttaacacccatggtctccttccttggttttcaaaaatagcaaattgtgctgaaggttgtgtggaaccaattaggacagcataagtgaggtgtgggcttccagcaggatggaccacccagtgcaggggccttacaaggcattgctggtggttgatgctgtatctctagacctggtggagcagacaatcagggcaagtccccaggatagaagagatatccacacagtgccagagtgaagaagtcacagatgtgtgtgtgacaggtaagctagattcacctactgaccaacaagctcacaagatggaaaaggtaaaccaaacccaagcgaggttcatcttctgtcaaccattagatgtgaccttaccctaggggaaggacagtttattcttcaggcatcattcccagcctgtcctccctttgataaaattctcttctctctttcccacagccctccagccatggattctcaacatcccagttgctttgagctgccccctgggatggctcctctgaaccaaagctgttccctggtgccccagcatgtcctgccagagcctctaggatgaaggagtttgttggcagaagtgacaggtgatgggagggaaaatcagaaatgtcaccctccatgggtatccagccagccagactggagcctctaaatggctccagctctttctagattttcctggttgatgactcttggagtccatcctcctggaagccctgagccaccttctcaccttgcccttccttctcaggagatgatcttggtttttactttaaggactaaacaaaagccatccgttgaacccattgtcaccatacccaccacgcttcccatatctaaatccatcgttttgtctctcctgccatgcgcctccccctgtgcaaagcgaatccctccagctttgcactgggttccactcttgtttcctcctctgggaccctgataactttcatcatttgctcatagactgctcatttccatgtaaggcattttcagcatggtgcttaaacgcacgctctggaagccagactgtctgtcattgtatggaaggcttgggggaaaacccagcttccctgcgcctggtgtccccatctgggaaatggagataataataattcccatctaatgggcttgttttgaatatgaaaaggttaatacatataaaacacttatacaagtggctagcacatcataagcatgaaataagtataggttatcttattatccctgcttccttcatgccaacatttaaatgtgatcatctctcatatttaagaaggaattctttctcaactcacatctacagccaactgctgtcctctctaaaaattcacccttgctattgattttcttgggtgagacaactgtgtgcgcctgttgcttttccctcctaatttctccctccttagtctagggtggtccagctccagtccgtccattcttgaaactgcttgcacgatgaacttcctgccactaaatccaaggaacacgtttcactcctgtctcttcacctctatgcacccttggctctggtgacctttttgctctcttccaatactactctgtgggctctcacaccctaccctgggcagttcctccttggcttcttttgctgtgcagattgataatgtaaatgcagatgtttttaagagtctgacctcacctattccctggttgttggcctgtggtaactctttccagccagccttctctcctgagccccgttggaagtggaccctcagatgtctcataggctcccatatgaagccctcccctttatccccaagctgttcctctgggagtttctatgtcagtggagagtatcaactcgcatcccatagtccaaaccaatggtgtaggggtcattcttcaacttttcctttactctacgttgattctatttcctaaatacctatcaggcccctcagcatctctccagctccacagccattacaccaacctggactactactctccctccctaggtcactaggatcacccttcacgtgttctctggcctcgcaccagtctcccctctgatgcatgccctgcactgccccagggagatctccatcgaaagttcactaaaggtttcccattgccctgatgataagcaccaaattccttaacttgcttttcaaagatctcgaaaccacttttgcaagaattatgacagggagaaaagtttaacctaactgactccatcttgcttctgacctcccaagttaactgtctttgctcattcctggacacaggccaagcaaactgtgggaggaattagcttataatttctctttgaaacaaggatgatcatagtccctccctaaattgaccccctccggggactgaaactgcctttgtaagactaatgaaaggccacaagtttaggattatgggtgtgggtgcctgaattctgctaaactataggtccagtgaaagaataaccagccattgttccagaagtcgcaagatttggaacttccccagtcactcctgtggataatatcactattgtcaaaacataagattggtctctgagatatttttcagacttttgtgttctggtgactgactgactccacctggacccatgactcacagcaaagagcttattcctacccagaaactcccacctagaaagtaacacagtgcattgaagtctgtttgaacacccctgtgatttcatccccaaccaatcagcagcacccgttccctagccccctggccaacataattatccttaaaaactctagcctccaagctctcaaggtgacagttttgagaaatgcctcctgtccttctgttcagctggccctggcattaataagctatttctctactgtaacaccacggcctcggtgaattggttttatttgtgcagtgggcaagaagaaacttatcgggcaattacagtcttgacttactggcatctggtctcattgccaatggaagttctccatttcatcttttatagtctgtgtttcagccacatgggttttagtggacttttgtcatgtattggttgcctagcatctgaatactttattttgatttggggaaattctcctgtgtgaatttacaccaaaagggctttagatacaccctctccccctcactggcaactagcatgtgatcatgtgactcagacatggccagttaggtggacaatgatggcagtgccccgccagtatcataatgaaccttgactgggttcttggcagcccaacttcctttggctactgcttgattcctcagtcgtcctgtccttttataagctacttaatattcttccaacaaattccttttcctctgaagttaaccagagtcagggtctagtacttgtattcaagaactctgacactgacataaatttttttgcaagccctctaacgtacaaggcatgtgtgatgctatctgtacacacttcacttagtttattcctaccaattcttcagacctggatttaagatttcttcttcatctgaaacctcacccatccctgcctcatttagaccagatttggtgtccttgtgaatgctttctgtagcactgggtttctctctgtcatagcactcatcatcctaaaatgtaattgcttattaagttgtctccactactagaagcaaggtgctcaaggaccccacttgttttgcctattcttatattcccagaacccagcatagcatctgtcacatagtagctctcactaaatatttgctaaatgactgaatgcattgcagcctcatcccagtgcccaaagttgtgactggaccctcctttaaattcaaatatctttagagatcttcagctcccaacatcctactgtgaattactttccaattcatctccaagccccacctcctagctctctttacccactctcttagaagtccactgccatggccacactcacagacctggattctgtccttggagaagcagatctgtgatgtgccattttgtggtagttatgcatgagatgctacagaggcacttgaccgagaaacaagctagagggaaacatcctgccagaggctttggaaggagaagtgctgtgtagggatggtaggagtgaaaaaacagaaaaagaacaaggatgagaaggtgtcagtctcccccactagaatgccagttccatgtgaactgagtccctttttatcattgctgtatccccaagtctagagcagagcttagtgcatggcaggtactcaatatgtatttgttgattgattgattgattaactgattgaatgcatattacctacagtgaagcaacataaaatacacatgcaaatatcttgatatttccagcatgagggattcaggaaacattccatagagcaaaacatgcatacagctctgctcattatcactgattgaagatggacaaagtgtaatggtcatgcctttatttagataacaccagaaatacttagtatgaacactttcacagtgtcatttaaacacatggtcttctaactctcctttcctcacactatcttaattcattgcccttgcagtttcccaatttggagtttctgtttcagaagcgtgtccccctggggaagcatacaatcctgtcctcctccaccttcatccctggcccctctccacataacagtgtctgatattccttccagcccattctttatacattgccttcccagctgctccaccccactcctactagaaggcctcattcaagtctgacctgctctgagaagcctctcttcatcaactcggtcctcatctcctgcccttttctgaacacttacaggacctggttctatattgactacttctgctctgtagttgtgtcatttatgagttaaatctgtcagagataaaattaagtctgagacaaaactcacagcctgtttattcataaatacatagtaaggaaacccatcagctgtcacttttgtggacaagtgttcaggggtgttaaaggagagttcttacacagcgtaaaaagaggaaatacagagacagtctctgattcgcaaatattatgcttaggtggaattttggaagctggagagactttctaattggtcttcaggtacatttggccatccttggttggcggtaatttggggagatttcaagaaaagaagggttgttcaacattggggtgggggtttcctgtggctggtcatttcctggaactggtgggtggggtactcgccgccgcggccagcagtctctcaagtctgatactgtagctcatgggctgccatgagggagaaatcacgtctcacacgttgcttgtatgtgcttcccgtcttggcgtacagccaacgttcagtcctatttccagatttaacatgaggacttgttgaatcggctttggagaaggaaaggtaactgtacagatacatgcacacccactgtgtgtgcgtgtgtgtatactccactagaaaatgaataattgatataggaaagggacatgaattgatatgtactttacatactgctctcagcatctccatcaaataaatccatcatatctgagtcaaaactcatagtctaattcataaacatgaactcatcagccatcacttctgtggaggagggtttgacaatattacagagtaaaaagaggaagtcatgactatatgtgcccagtgtctggctggttttgaggtgactgggaaagctacaatcaggctgatgatgtctacagaggaccatgctgcaagccccatcccatgagaagaaactgagctgcactagctgagtttctaaatgagccagtgagtatctatcaggactgggatgccctgggagaggtaggagtcacctgaaagtttggaataaccaggaacaatgcataggaagggaatattgctgcagcgctgcctatgcggatgaaaatggaaatttcacaatggcgtcatagagcccaatgtgctatcactccattggaaacactaatgtgaaacagaagtcagggggtagaacccacagagaataaaaaaccttttgggaaaatagatgctcaagaaacatttattgatgaacaaaaattcttatcagtgagcaccagatcactgcctcccagcactgatgatgccattttgcattttggccacattgtggatgtgggggctggtgacagcacagtggtgaccagtgaggaatggcatctggtcactccaatggcccagccaagtgagatactcgggagctggggtgttgggagtcaaggcaacacttaacatagccaaactattctgcactttagtgaccaagtactcgggggtgggagaagagcaccccgagggtagatggcattgaatgtggctgcgtctgcaaatgaacccatgtgcagcacaaaatctctccagtagctggctgtgactttgcatctccccgtggcgttttttttttttgccttctcaaaattaaatgacagagtcattttgcacttggagtttccacagtataaatgcaatggtcagccttttgataaatagactttgaaatgctctacatatgcctaccacaagcttttatccatttggctaattttattctttgtaagccacagaagacggggaaaatggccctgtgattagatctagctcagagactggggaagagaagtggaatttgagtcgtcctgaaaagcctgagtaaagcatcctttgtaagaaaggtggaatcagagcatcaaagaatcttggggctgcgaaggaccttcgggttccgcaagccctatgactcccaacgctaaccctccagcctgggtgtgtgcttttttcaaagagctccctgggttggctttgggtaggtggctgtataacaaaacagccttggcgttacgacactgggttcaaaactatgtgtttctaccactgttctgtgcttccgtttgcttttcttacaaaaggagggaacgtagtatctatctcatagggttcttgtaaatagtacacatgatcacccctgtagggtttttagaacaggatttagcataatatgtcaatcatgatgaagatcaagacgaggaagaagggctaagttggcaaaccactgattcaacctagctgctgacacagcccagaagtggtgttttggtgtcctgaaggtgtcatgctctgcattcctgctgtggacagcctggctgttagagtgtatcctgatctgatcctatctatagctctgcctctggagacggttgccagcaagcctgggtccttgctgtcctgaaagctgttgcagaaggcctgggctatgctgggtttgactcaggatcttgcaggctcactatttccctaagagcaggagctcagacagtaagtccccatggagggcaggttcttacgggtaaaacctcagagcagaacatttgcagggtcctctgctgttaacatgcagggattcctccctatcctggtgtcttaggtcagatttcctcaccacctccagagccctcaactcagcatgtcccatgagctaatgagaatgaaccctgtattagtccattttcacactgctgataaaggcatacccgagactgggtaattgataaagaaaaagagctttaagggactcacagttccacatggctggggaggcctcacaatcatggcagaagaggaaaggcacatcttatatggcagcaggcaaagagagaatgagaaccaagtgaaagggcaaaccccttatagaaccatcagatctcgtgagacttattcactaccatgagaacagtatgggggaaaccgcccccgtgatataattatctcccactgggtccctcccacaacacatgggaactgtgggagctacaattcaagatgagatttgggtggggagagagccaaactatatcaaacctctgctgtgggatgttaggaaatgcctatcaggctgtgtgatttttgtcccacagtgtacacattttctggagaatcacaggacatgaaaacaaatatgatttcattacatgaacctttccagtgtttgaccaaatattaagcttatcaggccaatttaactgacagttatagcatacttcctgaatccaagacacagagccaggcaccaagcaggaagaaggtggtgatatggccaacagaacagaaaatcagaagccctgtagtggtggtgccacggaaacagtggaaggtgaagtttctgcatgggtcaggcatacattggtgaggcacattcgaggccagcctcatggatatgtcacctgtgtagtcccgcaggtctgtcactaggaccccccgacctggcttattgtcctattgttgccattttgaaattcttttttttttttgagacggagtcttgctctgtcacccaggctggagtgcagtggcacgatcttgattcattgcaacctctgcctcccgatgttcaagagattctcctgcctcagcctcccaagtagcctggaactataggtgcccaccaccacacctgcctaatttttgtatttttagtagaaaccaggtttcaccatgttgcccaggctggtctcgaactcccaacctcaggtgatccgcctgcctcggcctcccagagtgctgggattacaggcttgagtcactgcacctgtctgaaattcttaatcatctttgaacaaaggtttctgcagtttcattttgtagtgggccctgcaaatttgtagctgttctggatttaattgtaaatgtccatggcctgctgacacccactgtgtactgtacctcttcttcctcctcccaactgcccaaaacattggattgtctctgagttaaggacaccagactaacccacaatctctgctcccagaccctggttgtcaaaagctatgtcatttttctgtacttgccctaaagttgcacaggaaaagccccatgtcccaatgtgtgcacacacccctcaaagatgaggtgtcccttgctgcagttcataccttggctagaagagtcagcgttttgtgtccttggctaccctgagaggcttaagaagctttgctctattattttggagaaaaaaatcaggatgagtgagctgcctgccccgggccacagctccccaaagtctggctcaggctggctgctgaggtgcagcattgaggagcccgtttatgattttgatcactgctcatcacaaatgtccacaaccagacttctctttgctcgtaggcagtagacaaagcaatcatgcacattttatggaggaggacgctgaggctctgaaaacaagtacttgtttgcacttcctggtgctttgcttggctgaagtttgagataaagaacgggaaatcccacccacagactgtcagggttgtcatttcaatgccattctcaggtagagaactgagctagcacatccacctttggaagaaatcgccccctgagtttaaggagaagcctgcacattgcaggggctggcagaggggagcagtgctgggaaagactggaaaggcttagcttcttgccaggaatttccattggaacatgcctcgtgcagactctggaaagacaaactggttcttaaaatatcttcaggtctggatggctgggctcgccaatccttccctccatgtggcagctccttcttgactagcatgctctctgtggttcttagatcattaacagagaaaaccagccaccactggggactgtagaaggtggataaagaatattccattgtcatagagctttacagggattctggaaatgacagcccaggataactccctcattgtatagataggcaggctgcagcctagagagaaggaaggggctcttactcccatcgacctcttcaaaactccgttactcccagattgttcatgctctgatggccgtggcggattgaagcctggtttccaaccaagtgccttgtggtttgaactaggggcatgcacttacctcagtgggactaccacagtctttctcctcacactgtaaaatctggactcaactctgattgactggtggaggccctggagctttgagatcatatagagtgtggtccaaccttcttccatcccatggatgttacaggaggtaaaacccactaatgaagggaatggatggaagccaaaaggaaaacaacccagtcagttgcagaaaggcagtgagcgagagtcctcttggttccttctgcttctaaggacctcattccacctaatgatttcacttgtgggtcatcctcaggctgctgtgggcacaggttgcacggcacaatctggggatcctttgggttctggcagcctcagctggcagcccctccaattctgttttgtattgccctgacacagatgcagaatgtacatcctttcttcagtttccacaactagtcacttagaacattctgtgcactgacttccctaaagtgtctttggagagttaatatgaatgtcctcatgtcaacacaatggacaaagcgaatatggacaaagcattcacttttaataccctcgtccctaaaagagatgtggccacttccataagtacaccacccccaccatctccttgcccagctgtggctctcctgccacttccgagggtctgatgatggagagggtggcagttgaggtaccttccatggctgtcctctctctcaactcctctgctcctcaatcttaccctacacgctgagttttatggaagaactttgatccaatggcagtggtctttggagggggatttattaggcaggggttgctgaagctgttctgaaccaaagctcaggcatcctgccatagcagactcgatacctggcaatatcaagtaggttggtattttacccatttaaatgtacagttttgtgattttttatatgtgtatacagtcatgcaattgccacaacaatgaagacatttaaaacttccatcattccaaaaattcccttgggtagttctgcagtcaatacaaccctcacccctagccctggagaaccactgatctattttctgttgctatagaattgtacataaatgaaatctgacagcatgtaatattttctgttggatttctttcacttagcataatgcttttgcaggttcattcatgttgtaacatgtatcggtgctttttccttttttatttattgctatatattattccataagatagttataccacaatttatttattcactcacacgctaatggacagccaggttgtttccagggtctggctattataaagaaagctagaaaagacttttgtgtacaggtctttgcacaagcatatgttatcatttctctcaggtaaataaatatctaggagtaggattgctgatcacaaggtacatgcattttcaatcttataagaaattgccaaattgtcttccgagtggctgtgccattttgcattcttatcctcaacatgtgagagtgacagttttcccacatcttcatcaacacttaagattgtcagtctttgtaatgttagctgttttagtgagtgtatagtggtatctccttatgttttatttagtgagaactacatatagtttattgcacttggtggtttataatataccacaaagatatataacatataaaaggttttgacgattgtctaagttttttcttacaaaaactaataatttttatgtttttttattttgacacaaaatagttgtacatatttatgggatacaacatgatgtttcaattcatgtataccttgtgcaatgatcaaatcatggaaattagcatatctagcacttcaaacattcatcatttgtagtcagaacactcaaaatcctctcttctattttgaaatattctatttatttatttttttaatttttttactattataatttaagttttagggtacatgtgcacaacgtgcaggtttgttacatatgtatacacgtgccatgttggtgtgctgcacctattaactcgtcatttagctttaggtatagtcacagtgctgtgcagtaagacaccagaacctattttttatatctaattgtgacttttacctattgactaatctcccaccattctccttccccgactctccttagaccctggtaaccactgtcctagtcattaagaagtatgaggacgtctttttaagttccacatagggatgagatcatgtactatttgtcttttggtgcctggtttacttcacttaacatgatgtcttccaggttcatccatgttgtcctaaatgacaggatttcatttttttttaatggctgaatggtatttcattgtgtgtatacaccacattttctttaatcatttttccactgatatttagtttttttctaaattaattaattattttttatttcaataggtttttggggagcatgtggtgtttggttacgtgaataagttattcagtggtgatttctgagattttggcgcaccgatcacataagcattgtgcaccatatccgatgtgtattcttttattcctcatctcctttccaccctttcattatatcacccttatgcctttgcatcctcataagtgctcccacttatgagtgagaatgtacaatgtttggttttccatttctgagttacttcacttagaataatggtcttcaattccatccagattgctagaaatgccattattttgttcctttctatgactgagtagtattccatggtgtatatatatactacattttctttatccgttagttgattgatgagcatttgggctggttccatattattgcaattgtgaattgattgatgggctcttagtttgatcgcatattttggctactgtgaatagtgctgcaataaacatgggagtacgaatatctcctcaacatacttattttatttcctttggatgtatacccagtagtgggatttctagatcatatggtagttgtatttttaattttttaaggaaccacccattgtggttttgatttgcgtttccctaaatgttagttacgttgagcattttttcatatacctgttggctatctgtatgtcttcttttgagaaatgtgtattaaggtctttgcccattttaaatcagattttttttgtttgtttttctattgagttgtttgagttccttacatattctgaatattaacctcttgtcagatgaactgtttgaaaatatttttttctcattctataggctgtctcgttattctgttgattgtttcttttgtgtagaaaaattttggtttgatctaatcctatttgtttatttttccttttgttgtctgtgcttttggagtcatattcaaaatattcttacccagtccaatgtcatgaagtttttcccgtatgttttcttctagtagcttcatagtttgggggcttacattaacccattttgagttgattttctatttgctgaaagataagggtccaatttccctcttctgtatgtgaatatccaattttcccagtacctcttatttaagaaattgtcctttatccactgtatgttctagacatctttgtggaaaatcagttgaccataaatgtataggttttgttcctggggtctttattttgttctattggtctgtgtctgtttttgtgctggtactgtactgttttgattactatgggtttgtagtacattttaaagtcagatactataatgcctccagatttgttctttttgctcacattgctttgggtatttttaatctttcatcttttatttttattttattttgtctctttcaaattttttatttacttatttttaaattttatatttaaattattattttattaaatttttatttgttattttatatttatttttatcttttgtgattctatataaattttaggattattttttctgtttctgtgaaaaatgtcattggaattttgataggaattgcattgaatttatagatcactttgggaagtatggacattttaacaacactgatttatccaactcataaatatgagatatctttccatttatttgtatctctttcaattttttctcatcaacattttatggatttcagtgtacaggtctttcatctcagtttcaggatacaaaatcaacatacaaaaatcagtaacatttttaaatgctaatagtgaactatttgaaaaaaaatcaagaaaacaatattttttacaatagctactaaaaaagtaagatatgtaggaataaatgtaaccaagaaagtgaaagatctctacactgaaagctacaaaacatttattacaaaaaattaacatttatttaaaaaattgaagaagagacaaaaaaatggaaagatatcatatatttatagattggaagacttaatattgttaaaatgtccatactatcaaaaagtgatctacagattcagtgcaatctctatcgaaatattaacactattcttcacagaaatagaaaagtcatcttaaaatttgtatggaaccacaaagacgctgaatagccaaagcaatcttgagtaaaaataaacaaagctgagggcatcacactatctgacttcaaaatatattgcaaagctatagtaaccaaaacagcaagacactggcataacaacagacatatagatcagggaaacagaataaagagctaaggacaaaatccacatagttatagtcaattgattttccacaaaggtgccaaaaacactccatgagggaaagaacagtctctgcattgtgattttagcttgcacttcctgaagggttaacaatattgaatctctttcgatatgcttatttgccttacttaaattattttggttgaagtatatgttgaaatcttgtctatcttttagaaggttttttttttattaataggttgtgcaagttctttattcttgccttttgattttctcaatgatcttttaattagaaaaagctttaaattttgatgaagcctgttttattatattttctttcttttatggcttatgccttttgtgtgctgtctgagaaatctagctcgaggtcacacaaattttctcctttttttttctagaagctttatggttttagctcttatatttaggtttatgattcattttgaattgcttttgtgtatggtatcaggaaaaggtgaaggtgatttttttcccaatagttatctagttattccagcattattaattgaaaagactcttatttcccccattgaattaccctggcacctttgccctggtatctaacctttacttgaaagttggttgaagcaatcacaaaagaccgctttactcaaggtagaaggacagctgaagaggagaaacgggacttcccttctgaagtggagacagtgtctaagactcgggcctccgttcacaaactgtcaggaatgattttgctaacaatgcagctttccatagcttgatatcatcctttaatatagcacaaatgtttttgcctttccccctccttctggggagccctcgatgccatagttagaagttgaagtaactctcaggaaaccaggtaggagaatttagaatctttagatatcaaagctagaaggaaccaataacctaataaagcacacactcttcatttgcaaaaaaagcaggaaagaggcccagaaaggttaagtgacttttccagcatcacacagcaatgaaatggcagagataggagcagattccaggtctcccaactgctccctgctgtctgacactcatcttccccacaatagcctccctcctagtgatttctctgaagatgagtggttcaccatgtattggaacttcacaaaatcatctgcaggaggcgtggcctcaagtggagcttgacgtagccctggctgtggaaagcaaggaggcaggaggctttagttagttagcagcaccaactcctcgccatagtggtcatctgaaatggctcagttgccttctaattgctcccaaactgttgcacatgccaggctttgggtgtttcacatcatccaggtttccccagcccaggacccttgctcattcatgtggctgctccatggccacaatctgttgcagacagaatgcatagcaggcatgcatgcatcacagcagtggtgggtatgtgttctgtccctgtcatgtttcttcagagtctgcagagcaagtgcaaggccaggctggaggagccacccaggatggcagccacccgctgaggtggtgcattggctgagatctcagcacgggaaacatcagccctgacagtgacatcacagatccttgtgttcaattcccttctttgcagatgggaaaactgagtcctagagaagataggctatgttcccaatgtcatacagcagagttgcatagcaagcactttgacagagagaaattcaactctgtacaccattgattctttgcttctgtttgatgagacttaaaatgaaaattatattttgtatttgcactccttattatatacttcacaattgcattggcatttatgcatccaaattactggatggtgttatctacataaatccatgtatactgtgctttatgaatgttttatagtacatgcagccaaaataacccttgaaatgtgattttcatcttacccagtgtcttagaacctcgttccctctgaaagatgtggctttaatgtggagctatttaattgggcggggaagaggggatcctgactcctagttaagcactctttccccagcaccaagctgccttgatcttccagtgaaatgtccaatttttgtcggaggttccccctccccaagacaaaaaaggggagtgcaggatggtggttttgccaggaagttagcgatgagggaaaatgcaagtagcaaatgtccatgaaatggagtttctcaccatctcaacaataagggtttaatttgcaaagtgccccccgacccccactactttccagtcagctacagcaaggcttcctggggctgagagcagcctgaaccctgtccctttaatgtggggtcctcctctgggctcttcctctctctgggaagtgactgtgcacagggaaagtgtaattggcaggctgtgacactgctgtctgcaagtgtctctctaagtggaacgcatttcagctttatctggtgatgtctgctacctgagaagggccctgggccatctcaaagggcttgtagcagctaattgtgcctgttaggaccagcaattagctggggatctctggacttcgaagctccaacacccaccagctttcccttcctttctctccctttcacttaactagcccagcctaatagaggcagtgaaggacaggcaggtgaggggcagacaggacaaggaaggtggaggctggcagggcctcatcctatgcccctctgagtcctgcactccacccctgctcaagagaacctgcgaaaagaaacaggcaccagctctgctctcatgctgtaaatacatcctctttattgcaggaccagggctagaagcttattaatcggtatcgggagtcatgctgcccgtttgtacagtttaagcgggagttggaagatgacaataaaaagctaattaggcgcaggtcataaaggagatcacacatgcatggtgtctgctggttactatgggcacacgatggtttcggtggaaacacgaggcagaacgtctgaaaattaagacaataaatcagtttcattgaataaaagccatgcatttacccattaattaaggataatggtatcctataagctttttgtgtaccacaggtaatttgttgtactttgccgtaataatatacgttgaagattaaaaattcagtataccttacaagtaatggatgcacacagctcttcctctgttctcagaagcagctaaaggttcatgcattagcacaatcccatattcaggctcacctgatctgcctttgtccagtgactcagactaattattaggcatgttctttctctggtggcttgcagtgagaggggagtgaccctccgtcccactgtgtctgctaatgtgccatttgggttttattttttagcagctatcacccatctcctttcttcacaaaactgtacccttatatttttgggggggatttcccccaagttttgcagtcttgaagggctgtcaatcaaggtgcccaaggcaggatgtaatcagagctcagccagtcaagctctgtgtcccaggactcagacgcaagcagagtaatgtaagggcagaggaaaacaaggtcctgggagctctatttaggatagagctgatcaacccagttgacaggatgatcaactaggttctgcctaggagatctctaagattcccaacagtcactcttcagggtaggcagaagaatgccctggggattaggaagacacccacttcctaatccccagaacctgtgaaaatggtacccgacatggaaaaagcaacttcacagttgtgattaaatgtgctgactttgagatgggtagataatactgggttttccaggaggaactcatgtaatcacgagtccttaaaaatggggaaccttggccagacgtggtggcttacgcctgcaatcccagcactttgggaggctgaggtgagaggatcgcttgaggccaggagatcaagaccagcctgggcaacctagtgagacaccgtctctacaaaaataaataaataaataaataaataaataaataaataaataaatagatagataaataaataattagttgggtgtggtagcacatgcctgtagtcccagctacttggtaggctgaggtgggagaatagcttgggcccaggaggtcaaggctgtagtgagccatgattgcaccactgcgctccagcctgggcaacagagtgagaccctaagaaataaaaaagaaagaaaagataaaaggcaaagaaaagaaaagaaggaaggaaggagaaggaaagaaggaaagagagaaagagaaagagaaaggaaaggaaaagaaaggacaggaaaggagaaaggaaaggaaaggaaaggaaaggaaaggaaaggaaaggaaaggaaaggaaaggaaaggaaggaaagggggagggagggaagggagggagggagggagaaagggaggaaggaaggaaggaaagaaggaaggaatcctttttcagctgagtcagagaaaaagatgacaataggagaagagtcagagtcgggatatgagaaggacttgaccaccatgactgaccatttttgaagatggaggaagatgaccaccaaccacaggatgcgagcagccactaggagctgaaaaaggcaatgagatgcattatccactggaacccacagggaggagagcagcgctgctgacactgcgatggtagcccaacgacacctgtgccagacttctgatctatgaaactgtaagatgatagatttctattgtttgagccattcactttgaggaatttgttacagcagcaagagaacgttcacactgttgaggctctgccctcagacttagccagattgtgtgtctgctgcttgtaaccagctctacctatcagaactggagaaagcaactttgccttctgttacctcaagtaaatttggatgggccataggtataattcacagctcagggtaggctggctggcctggcaatgaaacagagctggaaatgaaaggtgctgcctattctgtcttcccatgtttccagtgccaaaccacaccccaaaacatccacggacacgttgatgtgggaaagacctcttggtctccccttccctctctccttcctctctctcttcctcttccctcttccctcttcttttttgctctcttcatttttactctttcattttcagaacatgaatgcctggatctcccaaccattgccacaccaaaactccattcactggttctgggaaggcacatggatgtatgatttttataaaataagctcacctaagaattctgatgcacatgagattcaggtgcctgggaagggccaatggcctaatttaaagccaatatttccagataacataatgaagacttagaggatgtaagtgtcctgcccaaggtcacacagctggccagatgcagagaacaccaggttcagtgctctttccatgaccaggggctgctgccaactcgaggacattagagaattcagtgaccctctgacatctctcagtttagaaacctttctcttttaattggagcatttcatccatttacattttaatgtaattatgttatgttggggctttaatctaccatcctcccaggtgcatttgattcgtcttcttacccactcagtgccccttttagttttggggggttggttatttctttagttattccagtgtttcttctgtccttcagaagatatacactcagttactcttttctgcttaccttagtgccatggttgtccactggggcaatttcagcagatgtttgacaatgtctacagacagttttggatgtcaccatggcagtgggtggaggggagggtgttgctagtggtgactagtaactggaggccagaaatgctgctagacttcctatagtacacaggaaagtcccttccaataaggagtgtatggccccaaatctcaacagcactgaggctgagaaactctgccctagagatgacaacttttatctttgactcatgaaaatttaatgtcaatttggtaactttacaagtttcccagaaagtgtaatagaatactgcaactcctttgcccaatttcaactcatgtgctatcagtgttgggcattctccatatattttaaaccccacaagatattattgttatttttgatatagtcagttcttcatttagactttcccagagctctgcatttcttcctggatctctgaccttccatatggaatccttttccttctgcctaaagaactccctttatctcctggagtgttgatctatctgctggtaagaagttctttcagttttcgtttgtctgaaaatgtcttcattgaacttttttgttgtctttatgattactagtatgtttattgatggctacatgtagaaaacaccacggccttcacaatgaaattgttctgcacaaccacaatactattatcacacttaagaaaattaaaattgattaaataatatctaaaatagagtgaatattcaaatttccacacttgtccctgatacattatgatagctggatcctcttataaggattcacctgattgtcaggtcttttgtctttttcgaaagtctagaatacactttacttattttttaaattattgttattccgtttgcagtttttggaagaacgaagctagttgttcagtaaaacatctcacatgctgtatttttctgattatttctccagatttgatttagatttagtacttctggcaggaatactacatagggaatgtgcatacttcttgttgtcacatgtcaggaggcacataatgtcaggttgttctactagtgagggtcacttggttaaggtggttactgccaggtctcttccatgcaaatatatttctttggtggctagcatgctaataagcaagtatattttgtgatcagtaaaatgccttacactgtgagactgtgacatgtcaccatctccaacatttcacccagggtttttagcacctattcatgattcttgcctgaatcaattattgcactggggattacaaagtggtgattttctcattttatactcccttctatattgagtagtggttaatgttttttggaaaagaagagttttgagcactgtcttgctttttggaaaaacaatgtatctcaagcttattttgtatttcccctgtcccaggtgtgcagtcacttttcaaaggagccttggggttctttaatgggaaatggtatttaggagccaagatctgggctgcaggtgtgctcctcatccaccagctgttattgtctttagcccactttaatggcaggaattaggaaatacattttccccttaaaattctgaattcatattgataacctccaattcaataggaaattgattcatatttgcactttccttttaccacactgagaaccctactttgcagcaacatgtttacactttttctgtaaaatcctgaatttatactgaaaatctccagttcagtaggaaagtgattcatatttgcattttcccaaccactttgcagcaacatgcttatacattttccctattctagaatgcacacaatagtttcagaattgcacacgaagacaactgccattaacaaacctcccaaacaaaggtcaagattcctttgcagaattaaaagtatatgtatttttaactttagaatatagccttcctgtaggaatgtgtgattagagtaatatgttcaaaagttacttgaattaattttttatttctatggttatcagtttgaagtacaattttattaattcgcatcttcacatttcctttttatccctttgatataattttacttttgcatacataaaacatttacagtttcaaaattcaaagctatataaaaagataaactcagaggagtctcacacataaatttcacccaatcttactcctacccatcaccagaggaaaatctttttattattttccggtatattttttctgtgttcctttgtgccaaataagtaaggatgtatatatgtaagtatacagaatatatatgtatacatatgcacgagtatgtatacatatatgttatttcccagtggtttttaataaaagtatgatgtaatttatatagcttcctttttgccattgataaaatattcaggaaattactccattattccattatgctttatacaggtattcctcatactttgtttgagttgaatattgttttattatgtggatacaacaaagttcattcgaacaccttttctatgaataaacacttgggttgttactgctttgtattacttcagggtaaattccttagtggacttgcattgccttttttttttctttaaggttttgtgggtttattttgttttcctattttcatctgaatattaaaatccttgtccagatgtaggaaaaaaatttgttggtatattcactgtgattactacaagtgtatgtaacttagccagatgatatctttatgatgttattttttccccaagaacaaggaatttatttccacttctttgggtgtaatttcaggtttctcaatgtgtttttggttttcttcatctaggttttgcacatttcctattacatttattcatataaatttatctttttttgttattttaagtggatttttctctttcattacatcttctaaataattattatttggatatttaaaggctattgtcttttatgataattttacatcattctaccttattgaattttgtatatttgtgtgtatctttgtttgtgtattggtttaacttctatttattagagtttccaggtacactggcatatcatatacagagaaaaagttttacttcttttccaagctttatgcctcttcttgttcttaaagtattagccaatcaaagcagacaagagaaaaatgtacattagctatagcagagatgtttggaatcaccgtctttttctggagcttgatagaaatacttctagtgcttatccattaaataaaatactactttaaaaactaaagcataaatactttatcattaggaaagtatttataaattctgattctattgagtatttcctgatgaaaacaggaaacattaaagtattcatttaaatatttcaataaagcatttataaaaatttcaaactttcagaatatttttaatacaatggtgtttctttacccagactcaccaattgttgttaacagtttgctacatttgctagtgtgtattttctaaagaaaagaacattttgtgacataaccacagcacaactaaaaagtcagaaaatttaatattgatataatacattgtttaatttatagtctaaattccaattttaccaaatgtttccataatgtcctctgtaggagtttttactcagttcagtatttaactctggacaattacctaaaatttagttgtgttatctctttcattttctttaattttggacattaacttattacttaattgtctttcatgacattgacacttttgaagagtaaaaggacaattattttgtgaaatatccctctctttggtgaatgcttcccagtgattggatctaggtgactttttggactgaaaaactacagaagttacttgagcttctttgcagtgcattgcttaaggaagcatttggtgtcagttcgctgcattattggctaactttgttcaccagccttctccactgtaaaattactatttttccttttgtaattactaaacactttctgggatgaattttggctgaattattttggactatgtaaatatcttattcccataaaatctttcacccatggtttccaatatccattgatttcatcaattatccttatctaataaactgtgcattttttaaattgtgcttttctaattcgatctttgttcagtgtttaatagctggcattcttcactatagaagaatgttactctgcattttaattttatttttaatgtattgaattataatccatctccttaactattatttatgctatttttttcctatatctggacaatgggagtccctgcatgctgctttttcttgttgtagttttgacaaatcctcatccttctttgagtactttcacccttttagttattttcatgctatgtaatttttccattcttttactttcaatttatctatgactttttatatttaaagtgaatctgttatatcatttgatcttgcttttattagtcctttctctgccttttaattgagttgtttagttcttcatacttaatgtaattatttaagctaatttagatgttccattttactatttgttgttggtttttgttcttttggtcttctcttttggattttttttatttcggtcttttctacctttggtttttatcttcttttcctgccatcttttggcttagttgaatatattttatggttttattccaatttattggttagtttttagctatactttattgatttatttttactaggtgttaaaggctttaatatatacagccttaatttttcagtctacttaaagttaggcccatttatccccctctgtccctgctctgtttgttgtgctctagttgttttatatacatatacatacattacagttacataatttaaaaatctccagatataatgccatatgttttgcttcaaatagccttaaaggttgtgtttttaaaaaaataaaaagtaaaaagtctttaatattttctatatttttaccagttataggattctatttattcctaggtatctaggtttccatctagtattatttacttttgacctggagaatttccttaagcatttttatactattgtctattagcaaaaattctcttagttttaatatatctggaaatgtctttatttcagcttcatgcctgaagaatattttcactgtataaagaattctgtattgaaagtttttctttcaacatagtcatgtgttgcttaataacagggctatttctgagaaatgtgttgttaggttaaatgtatcactgtgtgaacatcatagtgtgtatttacacaaatctagatggtatagcctactacacacctaggctgtatgatatagcctattgctcctaggctataaacctgtacagcatgctactttgttgagtaataaaagcaatcatctttcattgaccaagacatcattatgcattgcatgactgtattttaaagatggcattctactgacttctgacttccagcacttctgaccagaagtcaacagttctttacattattgtttcctttaatataatggctgtttttctctgatttcaatattttctccttttaaagctttttaaaaatgatacataacatttgtatgtatttgtaaggtacatgtggttttttgatacatgtaggatgtgtaatgatcaagtcagagtatttaggatatccaacaccgcaaacatttattctttccattgggaacatttcaaatcttctgttttagatattttgaagtacacattatataactgtagttaccctactgtgctatcaaacgttagaactcattcgttctatgtaactgtatggttgtgctcattaacctctctctcttcatcactcccctcaaacacacacacaacctttccagcctctgatcattctactccctaccaccattgaaacaactgatttttcctttatattagatctttattagtttgaacaagatatgcctagatggaataatttttctctctctctctctctctctctttctccttccgtctgtctatccctccctctctccctccctccctcctttccttccttccttccttcctttcttctttcctccctccctccctcttttgcttcttccttccttctttcctccctccctccctcttttgctccttccttccttctttctttcctccctctttccctcttttgctccttccttccttctttctttcctccctctttccctcttttgctccttccttccttcctccctccctccctccctccctccttcctttcttccttctttccctccctcttttgcccaggctggagtgcagtggtgtgatcacagctcactgcagcctcaacctcctggtctcaagtgatcccctacctcagcctcttgagtagctgatgccacaggcatgcacaccaccatatcagcctaatttttgtatttctcatagagatagggtttcaccatgttacccagactggtctggaactcctgagctcaatcaatctgcccccacttaaccttccaaaatgctgcgattacaggagtgaggccccatgcccagatgaaatttcctttgcattgcttttcttggcatttgttgaacttctagaatctataaatctgtgtctttcaccaaatttggataaatttgaggcatcattcatttcttcaagtatattttctgttccactttccctgtcttttcattctgggattccaatgacatttatggtagaaatgttggtattgtctcactgtccttgtcctttaaacaattactattgttctgtcttcaagttcagggactgatttatatgtcatcactaacctattgctaatcaaagcctgtaattttttaaaaattttatccagactatgggtctatttatgagaaaattagtgcaaaggagctactttaccattactgaaagcagaactcgcctgaaaaaaaaatgatactaatgcattacttttaattttcactttcattccctaaggatattttaatgggtatagacatcttgtttggcagttattttctcatagcacacatacacacaaaacaaaaatttgttttctggcttactttttttttaattcagaaagtatttctcaattttgttgctgctcctttgaaggtaactttgttttacttggctcttgaaggattttgtgttttggtttattgtttggttttatttttatatgcataaatatgagtctattttttaatttatcttctttggcatttcttaggctttttggatctgtacttgatggcttttgtaaattctagagaattctcagtcttatctactgaaatacctctgccacattctctcctctccttttgtaactgtaattaaatgtatattagacttctgactgtattatctatatttcttaccgccattcattcctttctttcttattatttttctatcacttcctattattttttctccatcctgtatatttcttttgatatgttctctttttgctaatttgctttttagctacatgatatttgctataaaactcatctactgatttcttaatttcagctacatttattgttccagaatgtcctcttaaatctgccatatcgttactggaaagttctgttctctgtaaaaaaattcaatattgtcttttatttttttggtttgaacatagaaagaataattatttagcataattattttaaaggctgtgtcttacgttttccttgtaagcccctgtgagtctgtttctaatgtcttttttctgctagtttcctttcattttgtttggccaagcagcaaaacacaatctcttatctcttttctatgtatggcatcttatggagcaatatttttgatcctatgtgattctctcatcaactgtattattatacccattctgaaaatgagaaacctgaggcttaaagatgttgagtagcttctcaaagccacatggatataaggagatccccggaattcagaaccggagctatttgcatttaaagctaaaggctgagcttttaacccttggctacctggaaaaagttgggctgatgagatcccatttttcccaagtggcagagccaaaatcaaaccaaaccattgttatggatggatatggtggtcaatgacagttctacattctttttcaagttctctatgcagacagattttgcagcagtgcactgactgtgagctgcttttgatacgtgatctggggctggacagctggctccttgagtgatgaagttgaaataaggaaatgaataattttatgctcattttagagaggcttctctgaggtttggggttaggcagtggtaaggcacctatcactttctgccaaggccaaaatcagccggtaacagccagcataactgaccccagtgtttgctttcttgccagacactccaaacctctctgtataggctattgtcaaaacaacagcagcaacagtagcaaaaaagagataacatttattgaatacactgtgtgcttgtcattgttctagaactttgtatttattgatgcataaacatcactgtaacaatgctatgaagtacattgtattaatatttggattttgcagatgaagaaactaatgcatagagaggttatttaacttgcccaaagtcatctgaaatagcacaactatttagagtaagacacagagctcacattcagggcccacgtcagagtccacactcttaactaccagttaattacattgttaattcattcccttttgtgttggtggtcctatggtgggggagaaattgtgtaactatcctagaaataaaatgcaggatgggaatgggagtctgaaagaagtcaagtcctggatcaatggagagccaagagccaggagctgaggaggggtcagtggtgagtgaaaagagtcagtggtgagtgaaaagctccagactgcccaacacttggtgcagtggctcacgcctgtaatcccagtactttgctcacgcctgtaatcccagtactttgagactagcccaggcaacatagtgagaccctcctctccacaaaaataattaaaaattagctgcacatagtaacatgtgcctgtgaccccagttacttgggaggctgaggtgacaagatcctttgagctcaggggtttgagatcagcttgggcaacacagcaagactctgtctctacaaaatattagaaattagctgggcatgatggcgtgcacctggagtcttagctactcgagagactgagctgggaggatcacgtgagcctgtcagggtcgcttgagcctgggaggtcgaggctgctgtgagctgtgattgcattaccacactccagcctgggtgacagagcaagaacttgtctcaaaaaataaaaaaaatgttaaaactacacagtcctaggtggtggggtatagaggtgagtgtactgccatagaagattgcaagaagaggacatggaaataactaccagcaatggtcgtgcctgaaaagctgtggatccggctgcatcctggaggctagccagagtttctcttattttttgcttttttgttttttattttttgatgacgaagtttcattctgatgtccaggctaaagtgcagtggtatgatcaaggctcactgcagcctggacctcaccccgctggagtctgaatttctacttagctactcccaataaaaatgtgtatgtctttggaaagctgccttttacaacagattcttcactgatttttttaataataaattaaggctttcgctcagaatctcttatgcaacaattcttccatatatgcatagatgtgtcagaactgactcaagcgttttattggtgaagaatctcagaagctgggcaattttcacctttatgaagtatgctactttattatttatttatggcttttctcctgatttcccacttgctttccttctttgtctagttggtggtgggcctacccactgctacgggctcctttcagctgataattgcccatcagtttttacttacactgagtggtggctctggaattgaggggcccagctgggttcctaggtaatagactgtggaggttcatgccctgagctgggcttccccacctaggcattcaggctgagcccagccagggccaacagtctagtgggtacggagcctgaacacagtgcctgtgctcagagccagcagatggctagatctctcaggaaatgccaccctacttggggtcgcctggcctccttggctgtgtggggctggctctcctttcttgatggcacctaggaaattccagcttccccaggctctaaagtccctgcccctgctagctctagaatacagaaattcacataaaagctagattcagtcccagcctaagctctcaggcttctcactctgccagacactcctgatgtcagatgaggccatgtggggacatctaggcttgttcaaggccccttgccaggcttcacataaagcccacccttgtgtgggtgaggcatgggcgtggatgatctgggtagtgagtggggagaaaagcagtgaggtttgggggaggagcactgggctgggaatcgggaagttcaagctcggcttgcctctgcattaactctcgaacttctcaggtgccgaactgctggaaccaaggaggtcctcagatctggccacatgagaaagcagcaaggtgcaggaaaacagccacagacattacagtccaccagaccagggtccgcgaccatttgtgcctgtcactcactcatggcttcggccaaatcatttcagtgtcttcatatataaaatggaactggtgatgcctgacatgctcctcaggtgcccaaccaggaggccctaagacaacatttctctaagcttcaagcaagatcttgacacagacatggactgccatgcattactgggaatgatgaccacatcaaaggtgcaaggatgtggattaagtgtcagctgtagctctcattcaggcttcacagccaccgtgtggggcaggtgggaccacacctggcaggtttcacatgggaactccgagagcatattaggttatgggcaccattagaactgaaaggattattttcaagtcccatttctagcacacctgtagggtctcaatgcgtgtttgttgagtgaaagaaggaacttccccaccccactcatcctatattctactgtgtcaactattcacccttggagggcaaagagtggggcaactcctgggccttcattctgcagtcacttttcatggggagagtgccccctttctgacctcctgagattccagtcgctggcatgaaaacccatccttggctgccttattccctgacaggtggggagtgatgccttttgccattcatgaaaaaaaaatgtaaatggtgacaaaagctatttttataatgtttttatctattccatgactgacatcaataacacataacagtttcattgacattgtatcgcatccaatgggcccagtgacctgattcaatgtcagtagaaaagcctcgtacatcatccccgtggctgaattgcaacagatccattaccaatgcttcaacctcagaagtgtcccggaaccgacgccaagtccatttcaagtcctccttcccaatcttcctgttttgtaactgccttagctatcttaccatggactcagtcaccctttggctcacccccttaagttgttccatccctgaacttaccgagtttcgagggtcaggacaggtctgtgcatttggtactatgtgtcacatagtaggagctcaatttatgaataaatgagagggggaatggcggggaggaggaaagaatggaatgtgggtctacacctcagttacagcgtgagtgcttttgcatggctctgtgttccttgcagcactaggactcagctagaacatccataacaactcagggtccttggaggagtaaaacttattctcattgcaccagctggctctgctgggactgaatgtaatcagaaaagagagaaggctttaggacatttttgtaaaatgaaaacctactgtgggagagaactccctgccccagacttcagccccaggacctggaagccagccagcacctgaggaagaggaggccgcccagccaggtgcctgtgctggactcacagagagaagcctcccagccagacccaccttggttctcctcatcttctcagctacacaaaatgggaacggacattgactctgcaatcttattacatgggtttaagagagccctcactaatatagcaatatatgtgtcatttgtctcactagtaaggctgtttagtagtcaaaactgtagaaaattgaatatacacttactgtataaaaatgatatgcttggttagtgatagtttaaaagaaataagtacatctatcatagaagaactggctgtcagctctttatatgtaagaaaaatattgaacacaaatgtgataaatgttgggcactattttacaaaagttatccaacgaagttggtttacagtaagttcttcccagcaaagaggaagataaaaggaaaagagagagacaatggatagaagaaaacaagacaaagggggtggggaacaaggagagagaccgagggaaagaagagctccaaagtgttgagagaaaaggccccaagcactgtcctcactctggcatcgcgtagcccttgcctgctcctgcatccctctatttgggaaaagtttcctccccaaagggagctcagatggggaggggtaaatccagtgcagaagattccacgtcatggagaatggctgatgaacactcggtagttccatccccaggccaccagaaaaggcagttggaatggatcttgctatggtccagaggcaaaagttgggtagactaagagaagaaagttgaactactgatcaacagtagtacttggggagtggctccataaataaggaagttccaggtgggaagggaattctaaaataatgtgaggagctcccagtggggtgttagggtgctaagggggctggttgtgtgacctctaagctgggccctgggatggaggtgggcccctgtctggcgatggagcagtgaggaggtcaacaagtccactggggtcagctccgaggagcccggggacagggagtgtggtagaggaggacaaagaggacagaggaggtgggaggcccattcctggaggacatgggacttgactgagctttgagcctgagtgggtagagagttcttccagtcagaggagagtccaaagcagagggtgtccatctccatttggttggaacagagaaagggtgcatttgagggcaggggtaacagagataagaccagcaagagctagctgggagcgtctatcttggcatgcaagaagggcttgaaatcaaattcaaatggactcctttgagatccggtagatagagggcagccacagagggtgtccaagccaggcagagtgagagtgggagtgtgacagagcggggaaactcatgatgagccggagtgcccttcctccccagggctttgatctccagagatcaaagtgcctccaccagcatgccctcctctcccatgtgcgccctgatacacctctgcactgtctgggttccccatgagggcagagcttcaaagtgggacccaggggctgaggggagattcagaagtactcaggagaggaaggtgcagggatgggcctgtggaggctcaggaaggtgaatgtcttctctgcccagctcgagcttaggagaaagtgggaagtgagctgagagttctgtgcctcgctttacctcttccctattttcccagtcttaccttcattccattcttccttccttctcgctctcttccttcctttcacctttttcaatttgagccaacactggcctagtactgactacctgctaagagttgttagaaacaacttatggatatcatctcatttaatcctcataacaaccctgtatgtggcaagtgctgttactgagaaatcaatgggctccctgcttaaggcacatagattggatcttgcaatagggtgatgccaggaggcatgatccgattggatcctgccatggggtgatgccaggactcagtatgattgagtcctgatcctgccatgcatgtccacatcttaattcagtccccactccttgggagtgcttacactccctcctgcttgcacacttagctcatgtgggcatgcagaggttatgtgaccttcaacatgtgggtccatggcagctgaacaacaactcacgactttgttacataaaagttgaaccagatgggtgtggtggctcaagcctgtaatcccagcactttgagaggccgaggtgagaggatcacttgagccacggttgaggctgcagtgagctgtgactgtgccactgcactccagcctaggcaacaggagtgagatcctatctcaaaaaaataaaaataaaaaagttgaatcagattggtctaaagcagttacagtactacaattatcccctttttatagattagaaaactgaggctggggggaagttaagcattgttccaagtcaccccgtgagtaagtggcagagctgggatttgaacccagtctgtctggttccactgtctgaactttgctgcctctgaataattctcctccccaaagctgcccccatcaaaaaacaaaacaaaacacacaaacaaaaaaaacaccagtaatgttccggagagaccccaggtgttcagcaagagtattttgactctgtcttttcctttctggagcttgtctttattggagctgggaaggtggttccagggatgagggtggtagggtgggatacaggaagctcccctcagtgaaaggcaggaagactaagccttcacccagctctggcagtcccaagctttatacctctgggcttatattcactgttcccccttctgagtatccaatgtccatcataccactctgtatgcccctgcacacctatagcttagcttccacttataagtgagaagatgcaatctttgcttttcttttcctgagttacttcacttaggataatggcccccagctcctttgaagttgctgcaaaagacattatgtcgttcttttttatggctgagtagtattccatggtgtatatatgtcacatttactttgtttgctcatcagttgatggacatttaggttgattcagtatctttgaattgtgaattgtacttcaataaacatatgtgcagaagtctttttgatgtaatgaattattttcctttgggtatccagtagtaggattgctggatggaatggcagatctacttagagtctttgagaaatctccatgctgtgttccatagtggttgtactaatttacatccccaccagcagtggatacgcttggggatgtgttttttaaggaagggatgacaccatcattactgatgtatggtgagtcccagtgtgggtagagccctgggccaggcctggaggaggaaaaggaggaaaggtgaggggagtcttgatttcctatgagttcatatttaggcagcccagccactctaaaagtctgagggttcttatagtatcagagctaggaaatctggtagtcacaaagttgacttccatcttttcagctggggagacagaggcatgtgacaggttcgtcagtgccagggccactttgggtcagcagtggcagggatttctacatgtcaatgcacactcaacattcaattcacactcagctcattcctcaacgaggcttctcctccatgggcaggctccctgcatccttcctggtcaagccctctctttcttcatcttcagtgctgaggggaggaaagaggaggagaagagaaggggtgattgccaaaaccctggagcgcacccaaaccaaacggaggagattctatcttcactttgcacaagggatggaagaagctgagagaagggcccagtgtggggtaagcagtggcccaggcagagtctccatgcaggatattcacatcacccttgggacagcccggacagcaaacctgactttagtgcatcagcgacattctcctgggccctgcaaccagcgcatccttactggagctctggctttcttgcacaaatactgatgcctcctgagatgtcctcccagctcactgccccttccatcattgcccacccctcctccacacagggaagttgatgtgtggagtgggactcattattaagttgaacccttagcctttttcttggagaagggtcctgcccaccactggccctgctatatgtgtcccttctctggtccatcttgagccacacagaccccagaccactgtcctgaggtccttccttgtctgtgtggctgacttcccatctgggatcattctcacctccatcctcccaccccacaggtgttccagaactgtcctcttcctcctcctctcttatcctgtcttatttgtaggagttctttatatattccagttaataaccctctgtcagtttgatgtctattttctacacagtctactattttaattttgcctataattttttgtggttcagagttttacaattgtgtttcacttatttattcaacacatatttattgaatgtctaatgatgtcaaattatcagccttttctttgtctttttacttcttgtttgaaaagaactttcttatcttcttctctgattttatagtagttttttatgtttagattctgtaatgcctacatttatttttttcaaatggtatgagataggaatttcaatatatatttttaaatgtatactatatttcataggccctcctgtctctagtctttactaagttctcatatggacacagatctatttctgaattcacttttctgttctactactctgtctattctagtgctgatacaacttgctttttatcaaaatgggattaaaacatattttggacaaacactccttctcttttatctttaaattttttacagtttcttggctcttcttgcacagaaagtcttctatttaaatatcagaatcagattgtcaatttccatgaagaattttgtttgtcttttgataaattctaggttgaattcatgaatttattttgggaaaaggggtagattttccatgctgaagcctccctttcatgaatacagtttctgtctttgttactccagtttttggcccacctcctcagggtcttcctgggcaggaccactttcctcagatgtctgtatttctaaatctttgccttcctactaactatactgtctcatttcccactattgttattcccgggcaatggaaagaatgcaagcacccaaaaaaatctaatggcccatttatagttacaaaacaaatgacaaagccaagaccagaactcaggtcccttgacattcacccacctcatggccaggccccaaccactgaactaccacacccctgtagctactacctcctccagtgcttcatctccatccctcacacctccctgctacccagccttacaaaatacagtactttaagctactgtatatgcagatagctgcccgtgaggtcaggacatttatttgaatgcttacttagtgcttactgacagccaagtccaatgttatatgctggatataccaaaatgaataagacaagacccctggcctaagggtgttcacagggaattagatgtgtgcaaacaagttacaggtgtcacaagtgtgagaggatgtcatagtctgtttgcactgttataaaaccatctcattaatgtgtatcttataaaccacagaaatttatttctcacagttctggagtctgggaaatataagattttatttttttatttttatttttatttcattttttttgagatggagtctcactcttttgcccaggctggagtgcagtggcatgatcttggcttaatgcaagctccacctcccaggttcgtgccattctcctgcctcagcttcccaagtagctgggactacaggagcccatcaccatgcccagctaatttttttgtatttttagtagagatggggtttcactatggtagccaggatggtctcgatctcctgaccttgtgatcagcccacctcagcctcccaaagtgctaggattacaggcatgagccaccgtgtctgaccaggaaatataagattaagatactggcagatctggtgtccggtgagggcccacattctggttcatctatagtgccttcttgctgcatcctatatggtggaaggggcgaggcagatctctgggcacaaatcttattcatgagaactctgccctcatagtctgattacttcacaaaggccccacctccaaatatcattacattgtcaactagatttctgctattaatttgggggtgacacagatgttctgattatagcagaggatgtgtctgggtatgcctgatgaactggtgagtgaacagctagacgttgatttgcaatgtgggttttgtcgggggtggagctgtttacaagggagccaggaaggaatcaggatatactaccagatactggctgagctgtacccactgtttcttgtggacttatagcttagccctgtagagagaggtgctgttggcagagcctaagggaaggctcttttgcagccttggagacacacaggacccaaggaaccctgcttgatcatcagtgccaagcacaaaccagagtaggtgaactcagaagaactttgggcagtgaagagcccagggaacatggccactgtgtgaccctatcagccatgcccaggctgagactggtataccaccagcacctgtcttctccggaaggctctgagcaaccgcagcaaagggagaccccactccgggggatatcaatgtcctcagaggcaaacagactcaggtttgaatcccagatccaacaatgaaagcttgtggtcctcattacagtaccaaatggtagagtggacaagaagaagcaaattccttgattcctatgggaaggggattcaaacagtagctcagtggacatctgactctgaaacccgcatgtctgccttgtgtgaggtgtccagcgaccttagcgacagattatttgccactttccacgtgacctggttccaacagagggtacaaccctggggtggttgtgttgtttttctcggaatcactggtttaaagcaaactttaggcaaacttgactggcacaacttatgtcatgtctctgtagcactggtactttgaattacttaatgttatttaaattgatatttaatttatggtaagagggaacttgtggatcagataaaataaaggcaagggtaaagggtaaaatagacacatgacctcagctacaaagttagaggacaggaacctacaggacctggatggccagaatgggtcccagagaagagactgagatagtagagggagaagtagagaggtggccaggactggaaagcagcagggaatgtgcagtcagccttggaggataatggggtgcaacctgagagtgaggactggggactgaggctggagcagaagatcagagggaggtgtgaggagtagtgggaagtcgatggggcacaggatcggaccctgagataaaggggatgcaggttagggaatgggagcccagccagtgttgaaacccatgggaaggctctggcagggttttaggaaggaagactaagggtgattgtgggttaatgagaaagatcaaaggaaatcaatacgttgaagcaaagtgggtccaggcctgtgtcagcagacagaccttcctagagaaaaacgagaccggctggaagctccgggttatggtctggagacctgtctagtcaaaccttgatcaaggcagaggcctcacagactcagacagagagaatgagaactcctgcatagagtcaaagccagccatggcttttcattcaatttacatgtacctgcactgtagggcactcatgaaaagtgattgggagcaaattgagaaagatgaaagaacagagttctttctgcaaagtacaatcactgtgcaggattcctttccacattcaggctctgagagggtggaagtccaagatcaaagtatttgcagggatggtttcttcttaggcctctcaccttggttttcagatggctacattctcactgtgtcctcacatggtcatctttccatctgtgttatctatgtcctgttctcctcttttttataaggacactgatgctattagattgaggtacactcaaatggcctcatttttaacttaattacccctttaaaatccctatctccaaatacaatcacatttttgaggtactaaggattagggcttcaatatagaagtttgggggtacacaattcatcacataacaaggaccaggtgggatttattccaggtttgcaactttggcatgctacataaaaatcagttaacataatctaccatactaacaggctaaagaagaaaaagcatatgataatatcaattgttgcacaaaaagcatttgacaagcttgcacagccattaatgataaaaaactttcaaaaaactgggaatagagaaaaactttcttttttaagacagcgtctcactgtcgcccaggctggagtgcaggtggagtggcgtaatcatggctcactgcagcctcaacttcctgtattcaagtgatcctcccacttgaatagctgagactaaaggcatacaccactgcaactggctaattttttgtattttttgtagagacgggtctcagtatgtcccccaagctggtctccaactccttgcctcaagcaatcctcccacctaggctttccaaagtgctgggattacaggagtgagccactgcacctggctgaaaaacttccttgacataataaagaacacacacacaccctacagttaatatcgaggcaagagtatccactcacatgacacctattcaacattgtagtggaagttctagctagtgaaatagacaagaaaaaaacttactgactggaaaagaagaaataaaattgtctctatttacaaataacatgattttctatatagaaaatctcaaaacagtcctccatctaaaaagaaacaaaaatcatacacctagagctaaaatgtcggccatgtttacaagatcaatacgcaaaaataaaatatatttctatataccagccatgaacaactggaaaccaaaatatttttaaaaatcatttacaattattaaaaacatacctaggtttaaatctaacaaattatgtatagaatcttttattgaaaattataaaatgtggattaaataaaaaaggcctaactaaatggagggatatagcatgtttatgggttggaaggttaaacatagtaaagatggcaattttctttaaactgatctttagatttaatacaatttcgatcaaaatctcagcaaggtttattgcagacaaaggcaatcttattctaaagtttatatggaaagaaaagggatctgaacaaatgatctaaaacaactttgaaaagaagtataaaataaaaagaaccagtctaaccaatgttaagggttactatgtagctatagtaatcaaaatagtctggttttggtatggggatagacacatgggtcaataaaacagaaatagaaccctgaaatagtttaaaatatgcccaaatgatttcaacaaggtgtaaaaacaattcagtggacaaagggatagcattttcaacaaatagtaacggtgcaattggacatccataggtaagaaagtaagccttcatctaaatctcacaccttatagaaattcagaccaaaatggatcacagacttaagtgcaaagctttatctattttagaataggaggaaatctttaggacctaggactaggcaaaagtttttagacttgacacacacaaacacacacacacacacacacaagcacattttatgaaaggaaaaattgatacattagacctcatctaagttaaaataacttttgctattaaaaaattgtaaagatgaacaaactgagggaaagcattagcaagtcacatatccaacaaaggcctcgtatcaagaatgtataaggaagtcttaaaagtcaatagttaagaaaatgaacaatccaatttgaacatgggcaaaaaaacatgaacagacatttcactgaagaggacatacagatggcaaaaagaaaagaacatgaaaagacattcaacataattagctatggaagtaattcaagttaaaaccacaatgagaaaaactcacataacatgcagaagagaaggctgtgtaaaggcagaggcagagaccggagtaagatccatctcgaagacaagaaatgccaaggacggccatctggcaaccaccagaggccaggcgagaggcatggaggattccttcaccctgagccttcagagagagcatggcgctgctgacatcaatttgggacttctagtcttctgagctactgtgggcaataaatttctgctgtgttacaaaattacaaaaacacaatgatatctcactactcacctatcagaatgggtaaataaagaatcttgattttaacatatgctgctcaggatccagacaacccagaccgctcatcctctgttggtgggaatgtaaaatgctacaatcactctgaaaaacagtggggtgtgtcctataaaactaagcacacacttactatacagcccagcaattatactcttggacatttatcccagagaaatgaaaaatctatgtttacataaacacgtttatgtgaatgtttatagcagctttatttgttataggcaaaaactggaaacaacctaaatgtatatgtatgtgtatgtatatgcatatataaacgtgtatatataaggtttctttttgagataattttttttactcaatataattcttttatacaccctccattttgttatttatatcaatagttcattcacttttattgtgcactattctgtggtatggatgtaaaccggtttgtatggttaaactagttcgtttaaccatttgcctctgaagggcatttaggttgtttccagtttttgcctataacaaataaagctgctataaacattcacataaaggtttttatgtaaacatagatttttcatttctctgggataaatgtgcaagagtataattgctgggctgtatagtaagtgcatgcttagttttataggacacgcccaactgttttccagagtgattataccattttatattcccatcagcagtggatgagggatccggattgtctgcatatttatatatcaaatatatatatttgaaataacaaaagtacagagctcaaggatagaatagtagagttagtgataggacaggagtggatatagctgtaaagttctagcacaagaaaacctgtagtaatgaaacagttctttatctacattatggtggtggttacaggaatccacatatctgacaaaattgcacagaactacacacacagacacacacacacacacacacataagtaaataaataagcacatgcaaaactcataaaacccaaataatctctgtggattatatcaatatcaatttactgatttgttactgtattgtacttacgcaagatgttactgttggggaaaactgggcaaagggcatatggagcttttctcataagtttttcttcaacttcctgtgaatctgtaattaattaaaaataaaacatttttaagaaattcaagaggagacttagagaagaactttgtgtggataggaggggttccggcagagttatgggttggtgagtcaccagtatttgtttaaaccaaggatttgggtaaaatcactccaagagtttgaagaaagtttccacctcagcatttaaacatctggtggggtaggccctatggagtggagagagatgtaagggaaactctacacaagggaaagacctggctatgagagaagaaagtatctcaattaggaaggagtgtggactgagtggatgcaagcgagaagttcagtaagttggagtgaagtgtctgtggtgtttaatgatcttgacgagctgtgtcagggttgtgaaatgatgggatgatggagtgattgagggaaaaatggagtggtgagcacaggatgtggaaaaaaaaaatcgaagatctctagaaactggtcctttgccaagccttggtgttgggcgagggggacagctggaccatttattagcttgtttactctattactagaataaacctagcaatattctaggtttgaggacctgagtgatcctggggaaaagcttcctaaagaaaacattgaggcatctcaggctttaatgacctatttactcaacactggaattagagcagtgtgatatgtgtttgattcaatacctagttctgccactatcttgctctgtgatcttgagcaagttacttgccttgtctggacctaaaaagtatgcgtgtttttccttttttttcccatctcttcagtacccttttcctctaacagtgcagttccacctctagacaagaaagaagactcccatccttgctttggtactcctatagctgtacgcctcctgacaggacaagagaatgtgactggataaagccaatgccttctgctctagaccacaccagctaggtgggcccccgcccagatggtcctaagcccacttctagaatttcattgacctcttttttggatcttacctcccaactgcagaccacacactgggctagagttgtggtgaagggtctgctgtttgcaagtgtagacagagctggaacttgtgagcttggtgtccatacataaaaaattggaggctctttatgaggcaagagagagaagagtgggagagggagtagttagtaagctggagtgagagggttgggtgcattctccatgtatagctaaaattccaaggtgttggtagaaattctaaattcaagcctgaccttccagttgttatgaagctttatttgtcaaggtgggagtatatcgcattttaaaaaatagtttgtaacatgatttgtaacatttagaaatgtttatactgtcatgctgggctctgtaagtgttcagatggggcctgtgacagtccccttggaggaatgtcccctccctgattatgtgcagtttggagagacagggacttcattgcactgccttccttctatggaagcagcagaagacccttgagcctgcttcttccagagtcttctttttttgtcattgatgattgacatttctaatgttggtagtcaggtatgtgacttcagctcagacaatcgtattctttcttactggacttgagacttgggtggaatgactttgaataaaataaatttcagatgatgttcattctagcaggagtggatgcctgggttggggcatacctgttctgactcaggtcttacagctgggccccacctccttctccagactctctttcccataggctctggaagctcctcaatatccttctcatttgtgcttcatccagctggtgggtttctgtaggttatcatcaattaatcctgtggctattttttttaggcctcagatttctgttttgtccatgacctcacagagtcttttcagctctgatgtccagtagctcatgttgcagaagtttcagaagctactcagcttttccaaaataacaagttcatacttgtaaatgggaggtttctcagctattgatgccccccaaatagcatgagctgggtagagctcggggacaggagaatgagtggggaaggacattggacttggggggaagctgataagtccatggccttgaagtggactactgttgaggaatttctgggcttggtctttgtaccaaaggcaactgtgtgaccaacattgtttaatgggttcagggtgaccctaagttattccacctgaaggccagaagaatacaactccagctatgtacttttcattgaatgatccaatttaacccaatctaattagctcacattggtgccagttgaaggccctgaacatcactggattcttcaaggtggcgtgagttagtatctgccccagggagctcataggctgcacactggtttgacaggctttcccaaagcacctctcccgtcttctcgctcttactcctcctgagcaagagaacatttgcaccaacatccggagcctaagagatgcaacatatgcaacatatacattttaagaataaaaaaaagtatctgatttttcagaatctatataaccaaaagtgctagacctttctacccctctctgccctcctccctcacccactccaagcataaatatggaaagagggtgattcagtataattccatttggccagggctggagtggtgtctggaacactccttcggaaagatggtagacaaaacctctgtgcgatccagactctgggctatgtgactggattgcaaagtggtggtggtgttgtcctccttcttagtgcagggaggctctggcagtgagtgcggatggggaagtttgtaggcttgatgagtttgttctttagtacacagctcactctgttcctagccccctctgcagatgacaggaggtgctagacggtggaaagtaagatgtgtagtgctgtaggcagaaatttgatatggtgtaattactgtacattaaaatagatggaatttggatttgaaagcagagcagaccatatcttacgtgatgatgagaagggacacatcaccccacactgcgtcgcatgtgcctgaaggagcgttccagcctctgaaaatggcacatggaccaaaacgtccaaataaacacctcattgccgagagcaggagggggaggaagttctcaccgaggcagttgagagtagacgtgaatcagaaactacaatcgtatgaaccatcttttggttcaaacttgtacttgaatataaggcattgcaattctcttttcagaaccaaactggagccatgctaattcttttctgtggggaggatagagaaaagcaatagaatctcccaaggttttactgaaccacttgtgccaggttaggtcaagaagacatatgaggaagatacatgttctaaggagtttgatagtttatttggcaatctaaggaccagtgcaaataatttttcaaatatagtctgtaattgaatattattacacataatgcaagtaggaatgtccaaaacgaaagcatatgttgggaaggttcaacttgagtggagtggattcaagtagacagagggcaggaacatgtgctatctgattgaaagtgggggaacagtttgagaaatagtacacaggtgaatacggagatgctagatgcatgcagacgtgggaggaaaagagggagaccactttgttggcataagacaaagagaattcaaatgccggatggggacctgactagagagtctagtgattcttttctgcctatatcaaccctcagagcttctgatcatgaaataccaggttaaatcctgggtcaagcttcagagggtgggaaagaaccatgggaagtggtgtgcaatgacattttattaggaagagtgccatcctactagtactgattctcaggttttgattgggttttggattttctttttgttcatctattgatcttactgcctcagcgaatggaaagacagcataaagttgccttaattcctctgcaaagcattactgaatttttagaaaagaagatgccacgctgggtgtcctggccaccaggctggctttctctgagtctaacactgaatttcccgacctctctcccacatggcagagctcacagctgccaccactgagatgcagcacctgttagggtgattttctgaaactgctcttaaaagacattttaaatatataaacgtcactcctggaggtaaggccattttgaatgcaaagtgatcatcacatcttttgcaatctatttttagacttctttcctggagccagaagaatatgggccaactagttaagagggaactgaaaataaagcttggactgcagatgccatcaccagcattcacaagctgagataatataatggaccatgtgtttgcacttgcgctttacctcccttttcctcactccctctccttgagacctctgccaaggttgacacctggagcatgaagggtggagagtcagcaggcctgcagaaggcctcttggccagcttgctgttcaaaacaacatctggctaggagaccatgatttagctccaccctccacctccatcttacacacacacacatacacaaacacaaacacataaacacacaattctgcccaagtaccaatgaagacaaatggggagaagaggaaagtcgcaccgtcacccaaaaaggggctaacagacattaatgtcagccgatgaaaggcattgaccctagtaccaatgtctttagaaatacaaagcggagtgggaaaacacagttataatgacatccttttacttgcttttatttgtctttgacagatctgctagaaaaaaaatgagaaaacctaaataatatgacttttaccttacgcagaatatatctttgtttctaacacacatataggaacttatattagttaacaaaaactcaataaacttaaaaaattataaacatgtttcacacataatgtatttacttattaagtataactaaagtaataatgacaaatatttttaaaacaataacaattgttaggaaattaagcaatactctatgaaatacctttttgccaaataaaaattcaaaattttaattacatatttctattatatttatagaaaagaaacaatgcaaaagctacatatcgaatctcaaaaacagtcaaaattcctctccgagaaaaatttaaaatattacatacatacattatttaataacattgttaatgaattaagcattaactcaaggacatagaaatataacaataaaaacttcacagaaaatacagaaccaaatcgatagaatcagggtttaaatacattagaaaaagtaaataagtaaaataaattatatatatacttattctgtgcatatatatacgtacacaaacacatgcaatattttaaaactttttgtttttggaaatgctaaggattgcaaaaaagaggaaaaatacatgaccagtataaatattggagaagacgaaacaaaattatcatgatttgcagttaaccacattgtctttgtctaaatgttaagacaactgaacaatgattcaaagtaacatgaaatgtaattaaaataaatgtcaagattctctctgaagttcaacaaagtgattttaaagtatatgaagaaatcaattcaccaagaaaaaaaagttatatccagtaatgcagaaagtcttgcctatatacattataaagctacaataacaaaatcagtatggtttggcctttttttttgaccaagccaatggaccagaaaaaaaaattcagaggcattcctgggtttatgtcaaatggaatttaaaatctgtagttaaaaattatatggctcaatcaatgtgttgagacaatgaccaaccacatgcaaaaagaaatttgatgactaatttatgtgaataaaatgtttaaatgtaaattataaaattaaaaaatttagaagcaaatgtgggtgtatatatcattgacagataaaagaataaagggggaagctgagaaaactttaattataaaatgtgtaatactttgcccagtttgctctttctactttaattatagtaaattttaatcctaatacaattaaaatgctttctattgtagcaaatatataaattaactcatttatggtaggtttgttgtcttgcttggaaaatcctatgtgtgtgtgtgtgcctgtgtgtgtctctgtgtgtgtatgcatgtacatattaaaaacaaataccccctgaaaatcagactaacataacgtttaagagtatggattctgccagtgcggcagacttaatttccaagtatgtgtgaccttaggcaatttaattaatctttttatgctcaatttacttatctgtaaaatagaaataacatttcctaacttattggtgtgtcctgataattaaattacttggaatatgtaaggcacttacaacagtagttggcaaatttaagcattatatttgtgctattataattattaaaatactactaatgaacatgagaagtttctttagaattgaaaacgcacactaacattactaaaattattttacatttattttgttcaaataaatgcaatttaaacattaatgaattcttatttttaaccataaaatgacaaaaccaaaacatttcaactgtcagcaggttttcagagaaataaacactgtattaattggtttcaaactgattttatttttgtcttattcttaattgaaacttaatttcaaacatagcagtgcaacttggcaatacctaataaaatattaacaatacatatacttttaatccaacaattcttcaccagtaatatatcctatggaaattatacatggacaaatgtttagctgcaagaatgatctttccagtgtttagaaaattggcatgatttcttttttaaatgtctgatagaattcacaggtaaaaccatctgagcctggtgctttattttctgaaaggttgttaattatttattcaattactttaataaatatgggccaattcagattgttgatttctcttcttgtgtgagttttggcagacaggcttttaagaaattggtccatttcatctaagttatcaaatttgtgagcatagagttaattctaatgtttatttattatctttccaatatgtaagggatcagtagtgatgactcctctttcatttctgatattagtaatttgtgttttctcttgctctttctctgcctctctctgtctgtcttttggttgccctagctacagttttattacttctaaaaatacgatcaaagtgtaacttttgagtctgttgattctctctattgattttctattttcagtgttatttatttctactataatttttattatttgttttcttctgcttaatttggctttgattttgttttctttttctagcttcctatggtggaagcttagataattaattttaaatccttcttcttttctaatatgcacatttaatgctataaatttccctgtaagcactgtttctgctgcatcccacaaatgttgataagttgtagtttcattttgttcaaaatatgtcttaatttctcttagtatttcttttattcatgctatttagaaatgtgctgtttagtctctagatattttaagatttttcagcttctttctgttgatttctattttaacttcattatgatctgagaccagacatcatattatttctatacttttaactctgttaaggtgaattttatgacccagaatgtgttatatctcagtcactgtcccataggaacttgagaagaatgtgtactctgctgttgttggatgaagtattttataaatatcagttagagccagctgattgatggttctgttcagtttgactatattctaactgatgtttttgccttaggaaactaaattactgatagaggggtgttgaagtctccagctataatagtaaatttatctatcaacttttgcctcatgtattttggccctctgttattacacacatacacatgaagtttggagaattaacatttttattataaagtgcctctctttattcttgataattttccttgtgaagtctgttttatctgaaattaatttagtgttttatttttattacttctagtttggtatatttttctccatctcttcacttttgtgtctttatactgaaagtgaagttcttgtagacaatgtttagttgggttttgtttttatatccactctgacattctctgtcttttaattggtgtatttaaaccatgcaaatttaaagtgattatagatacagttggagtaatagctaccatattgtaactattttctatttgttgcccttgttctttgtttcttttctttccttatactctttctggtttgaattgagtatgttatatgagcccattttctcttctctcttagaatatcaagtatacttctttttacatttttaagtgattgcactagaatttgcaacatacatttacaactaatctaggtctactttcaaataacattataccacttcaagtttagtacagtactgcataacacagtattcccattcctcaccagccccttacaacattactgtcattcattttccttatatacaagctatagacactcaatatgttgttggtattattattttgaacaagttgttatctcttacatcaattaagaataagggaaataaaatactttattttaccattacttatgccttttctaaagctcttccattttgtatgtagatccatgttcctgaccaatgctcttttctctaaattgatgttgtttacaagagtaaaatttgggaaacagaataaatattcatcagtaggataaaaccatggtaaattcatataatggaaaactattaagctgttgaaaataattgcaagcttccacacttcacctgttctccaccttcccactggtaaatgaatcagagctgaggaaagttcaccaggaaaaaaattccaggcatcctgtgagcgtatttcagagagaattaaccatctctacttcctcttgtgcttctgagagtgttttccactgctgctgaggtgacagaggctgtgaagaaggagaacagagtgcccaacagcacgcagcaggacacagaatgtagactggcagccttgagttgtgggggtgcttagagtaggagcccccattaaggtttgcaaagtgcagctctcacaacacggggtcaggtggctggagaggggctattcctttgtcctgttaattacttgggttgtttctagaggcattggaatatgactgatttcccccaccaagcgttaactttgcctactcctcattcagaaaactaggctttgttgttctcccagcttcaggaaagggagaagtttttcccagaggaaaagagggggaaaaaaagtatctttctttctccataatttcagcacaacctagacccttggaagaacttcagaattctaggtatgggcaacattttaaagaaaacttcaggactcaaagtttcctctggagtgcagggagagaagcagagagatcagtgttctctgcaggggttccttcggcctgtaccctaagctgaaccttaataggaggaaagcaacccagaaaagttcctaggaaatctaaagcagtagtacgtggcacagattccttaacaacagccaggaaaggcaagaaagtcagtgaaggcagcaaggatttaagtaagctggtggaatttctagacagtggtaaagcccaggagaagcatgcatctcaatccccatgtgcttgagggcagtgtggatcttagggatggaccccctgtagcagtggaatggcccagtgactcagactagacacggggataggcacattggtgaatgtcagatggtattgagtatcagacacccagccttcactctatgagcccaggctatgcatagccctagaagcaacctgtgtggaataagtgaaagaaacccccagtttttcttaacttaaatttctataattcttataaaatggctgctcaaaatggatgttaattgagtcacaaaaaaaaaattatatttattaaattcttgtggttttagactaagattccaatttgatcattttaatgataattttaggcccaaactttcctggggtgatgatgtgaggagaagggagaataaagacaactattaccaagttgttgggtctgaaagtcccatctcactaagggttaaggcagaccatttcttacccaaactgaggaagctggcagccctgattgtaaataaggaattaatgagtgcatcaaagacaatgttgagattgcataaaaaatgaacagttcacaccttattttttcaaagttaacttttttcagcttaaaaacctgataaatgatttcaattaacagttacagaaaaagaaaattatattgcaaattcatgcaaaatcttccttcaaaatcacttgcttaattacacaaatcaattcttcagactgaaaatttagttctaaaatagaaagtaggaatgtttcagaagcagtcacatgggtaaggtgaaaatcgcagggtggtcggctctggcctttgttttatagggatgaaacatgataaatatcacagaaatctagtgttttatgacccaaagttgctccataaataacttagaatagtgtagtacattagaggtctaaggaagtacttcagacctggttcattctcctctttgggcgaaagtaacaataaaccctttaactctgagacagccccagaatatgttagttctggagcaattacgagttgccaagcaactcaaacaggcatgtggatgctctgttatgatccaaagaaatctttgtcatcatcattatcttcatcatcattgccatcatcactgccattattatcattaccatcatcattatcatcatcattgccatcgtcatcatcatcaccacctaagaaccttgcaatcatttggatgaaccttgatgtgatagaaaaggtattggggttagaaggcccagatactaaactgactcagcctgtagctggtggtttaattttggcaggtttccctgctctgggcctccctttatgcatgtgtggctgaggggatggtctcgataagcacagaggacccttctcagcattctctgttatcccatgcttgcccctgctttcttagttcatgaatctttaaggtctttgagggcaaagaccttgtcttgttgaccacgatatccctcagggagcttgtctgtgcttgtcttagagtatgtgactaatactaattggctagtgtaaattagagttgagtctgttttgttttgtgggggattggtggtgtgtggaagagatggagaaagacagaagaagcagtaaaatgtattgactgtttagagatgtaagtttttctcaccctcccctgatcaccaggcaggtaacatcctgggaccttggtctctaaaccccggaaaacacattcatgttatgcagcatgtttgcttgtctcatccaatatggtgtcatactccaaatttaacatcttttgatctatatctacttgagttcaaggtgctcttgattttgagaattatgaattataaggccaagctatcaatccccacacaccctacatacaatgttgaagtggatagtaaaatcacaataaatgcttcctttgaaaagagggaataatgggaggtatgtagcagccaatggtttatgggcattctgaaaccctactgtgcaaacagggagagcattacttgactaggtcatggttctgttttctgagagtggtttcccattcattgtttttcaaagatcttgacaccactgtttgagatcccatttgttttctatcattctctttgactacttctagaaaaactggcctgccttggcaatgagttgctttttcagcctgcttcttgaccttaagaagtttggggcccaggagtgtctttataattcaaaataaatatcagttttttttattatatactggtggcattttgccaattcaatttcattaaaaacctcatggaccttctatgtatctaactagtttttactccatgcttcagattccaaaactaaaatagcctttgagaaagacttttctcttttaagttactagtttgggattaggcctccatgtttttcatcttctctttagtctatctgagaacatgtatataacatttacaaggtaagtgacacctatgtttagtttcttgtactcagggctcattttattttatttactttaaaaattaatatacagtaaaattgacttatgttgcatctacagttctatgaattagaaaacatgtatagatttatataaccaccatgaagtcaggagggagaacattccatcaccttaagaaagcccttttataatatttctttatagttacatttttcccaactactaacttctgataacaactgatctatttttcagcattgtattttgcattttcatgaaagtcacataaatggagccatacaacatgcaagttttcaacactagatatactcactcagcataatgcctttgagtttttgctcttatcaacagtccttttgtttgtgcagataagtaggattccagtatataaatgtactgctgtgtgtctaaccatgaaaccactgaaggacatataggttgtatctagtttggggcaattatgaatagaattcctctaaacatttgtggacaagttttaatgtgaacaaaagtgctttaaaaacatttataaacatttataggataaatgtctgtgagtgagatttctgggtcagtggataagtgtatgtttgccattatacaaacagaacactctttttttataatgcttatgtaattttatatttctaccagaaatgtatgagtgttccagttgctcttcatcctcactaacacttggtattgtcagtatatatttttaaaatttttaaccagtcgtacatgtgcagtggtattcatttcagctttaacttgcatttctctaatggctagtgatgaaggtaattttttgtggcttatttgtcacacatgtataatcttcagtaaaatgtttgtgtctttcatcattttctcattggatttttttttctgtttcttattggattgttttctattttatatgaactctgtatgaattccttgtcagctatattgtttgcaaatatttttccaagcctgtagatattttctcatcctcttaacaatgtctttcaggaagaaaatattttaaattttgactaagtgcaatttattgatttatttttatttgatgaattgttataggtgtcatgtctaacaagtgttcaccaaaatcttggtcctcaatatttccttatatgtatcttttttaaaaatttataattttacattaaatccatgattgattttgagtcaattttggtagatttagatcaaggtgtgagttttatatcaagatttacttatttatgcatagtgatatctaatctctagcattatttatcgattcaattgcttttatatccttggttgaatttgaaagtggctatttcttattttgctattctattcactaatctatctgtgaacccctccagcgacagcacattgtcttgattactgtagctatataataactccttttttttttttgggggggaggatggagtctcactctgttgcccaggctggagtgcagtggcgcgatctcagctcactgcaacttctgccctccgggttcaagcaattctcctatctcagcctccagagtagctgggattacaggcgcctgccaccacgcccagctaatttgtgtgtttttagtggaggcagggtttcaccatgttggctgggctggtcttgaactcttgacttcaagttatccacccacctcagcctcctaaagtgttgggattacaggtgttagccaccacgcccggccattttattctttttcagaattattttcgctattccagttcacatatatatatttttatatagcatatattttatataataaatataaaattattttggctattctagttaatatatattacatatttacatgtaaatacaacatatttcataaacataatatatactttgtatataaatataaatatattataaataattatataaatctgtaagtataagatataatttatattaaaatacaaatatatataatttatatattatatattataaatttatatatattatatagtatattacatatttatatgttaaataaataaaatatatatttatgtatgatatatatccataatgcttatatataatatatatatgcatatatttaaatatataaatatattatatacataattatatataatttcttacatatataagttcatgtatataagattcatatatatatgaataattttgcctgcatctagaaaacaatcttgttgggattttgataggaattaggttaaaccagtatataaatttaaatttgggaagaattgacagctttgttgtattgaattttctaatccctaaacacgcactgtatctctttaacttagattgtctttcatttttttcatttacaatatgcagcttttggcatacatacatagttagatttgcacaaaaatattacaccaattgagcaattaaaaatgatattgtattttaaaatgtatttctacgtgtcaaaaatacaatcaatttttgtatgttgattctatattctacatattttgttgaagtaacttatactttctaaagtcatttttgtagactgtattctagatcaaagtaatttaatgtcgacaacaataccaactcagttatttcagttgttaaattaactaagtgtaatgtcacaaatggcaaaaacagtttagacaatcggtcagaaaataaccaaagacctcatacccttaatggtctggatttaataataactacaaagtgcttaatatgtaagagtaggaaatagctaatttccctccagattctttattattttctatgtagaaactcatgtcatgtagaaataagcacagttttctttctttccaatctgtacgcttattatttccaattcttgccttattgctctacctagatcttccaatattatgttgaatcaattattaaatatggttgttgaatagtaatgataagagtggatggtattagtttccaatctcaaggggaaaacatcagtttttcactattaaatattacattagctgtaagtagcttttatagatgctctttatcaacatgagcacatttccttttatttctaattgaccaagagtgtatataatgagtgggtgttgaattttgttaaattagtttgtatcagttgataaaatcacgtgatttatttattctttgacatgataatatggtagattatattgactgagttttcaaatcatgaaccaacctggtattcctgaaataaacttcactgggcaaggtatgtaattaacatgtgttatgtatttattttgggggggcgctatgttttttggtgtgtgtatgtatataattgtttataattcttgttaaattgatccttttgtcattatgaaatatattttatgtctatattaatataggcaatccatctgtcttctgtttactgttcgcattgtttattttttatcttctcttccaaaacttgttgtctttaaatgtaaacggagactgttgtagacagcatatggcttgattgttgttttccttttaaaattcattctgccaatatctgccatttaattggataattttattcatttacatttaatataattacttgtacgataatatttacatctgtcattttgatgtttgctttctttatatcttgtcttcgttactcaatttttcccttactgactttttgtgttaaaatattttttcatctgtaccattttaatgcgttcatcgtttttttcttatgtatttttgagttattttcttggtgggtttcctgaagatggtcagtaacatttaattttataacaacctactttggattaataccaatttaatttcagtagtacacaaaaactctgttcctatatagctccatttgtctcttcctttgtgctataattatcacaaattacatctgtatacattgtgtgcacatcagcataaatttacaattattgctttatgtagctctcttttcaattatatagcagaaaaaagttacaaaaatatttgtactatattttgtatttagctatgtgattacctttatcagggttgtttaattcttcaaatatattcaacttactgcctggtgttctttcatttcatcttagactccttgccatattttttatagagtaggtcagctaatgattaactttctgcttatctgagaatatcttaatttctcctttatttgtgaaggattttaaaaaatatatatagaaatctgttttgatagggttttttttttagcattttgaatatgtcattctactgccttttgtctcatgatttctgttaagaaataagatgttaatcttattgaagatctcttgcacataaattgcttatctcttcctgctttcaagcttcttgttgtctttggcattcaacagttatgatattacttgtggataccctgaagtttatttttcttgaagtttgttaagctctttgaatgtgtagactaacgtttttcgtcatatttaggaaatcaccccccacagtctgaactctcattatatgtatattagtatgcttggtgttgtcctacagatctctgatgctctgttcatttttcttcattctttttattctttctctttctcaaattggatactgtcaattgatctatcttcatgtttgttacatctttcttttgccttcttaaatctgctgttgagtttgtctagtaatttttttcagttattgtactttacaactccagcaatcatatatacatatggatataatttctatatattttattatatatttatttaatttgtttaatgtttaatttacctactttattgtatatataatttctatctctttattgatattctatatttgttatgtaatgtcatgctttaggtttttaaacttagtttccttcaactaacaaaacatatttaaaatcactgacaaagtatttgctagtaagtacaatgtccatacttgctcaggttcagtttctatttgttgctttttttctatgtattagggacattttcttgcttctctacatgtcttaaaatttttgttgaaaatattttaaatattataatatgtcaactctggaaataagcttcttccttttttctcagggtttactttatttgctgtttgctgtaattgctgtttgtttagtgatttttctaatctactgttgtaaagtctgtattatttattgtgtgtagccacttaagtctttcattagttagtttagtggtcagctaataattggacagctatttccttaaacacttgaaagcaataattctcttggtttttgtttaaggtctctgtatgaacattgaggcatgccttcaacactcatccagacagttgacaattatgcctttctgcttgtacagagcctcaggtccagccagaggtgagtgcttagggccttctcaagtcttcctttattatacacatagccctatgtatctgcatgactttctggatttccaagaatatgtcacaacttttcaaagctcctacggatgtattattacccagcttttccttttaagttagtctattgtttttccaaactgtcatccatttccttgggcagccatagtgttaaaacatttgcctgtaaatgtttttgagaaactccctctgggatgaaatttctagtattgagtatcaagttaggtcaaataaagacaggatgttgtagtaggatcttacagggaactatcagacaagtcaaattctgacaatcctttgaccatttgttccctttggtactagaaatggaagctattgtttttcaaggctacttctttgctgaggactgggggatagaactagaataacttaaaacatcataaaatttgctgttaaactaagagtcaaccacttttcttctataaacactttgtgattattgaaagcctttaattaatttccaaagttccataaaagctgatcctgatcatatattttgccagttccttttctttggttttatgtaggggcaaaaaatttacagaagtccttactgcaccacttttactgacatcacccatttctatcaatttgtgcttcacacattttgtagctctgttgtttatttatctacaaggttagtattcctattaatttttgatagagggacacttttgccattatttaatattgctttctgccactggaaatattctttcctcaaaatctactctatatattaatgtaaccactcctttaattttctcttcatttctaaaggatattttctctggatatagaattcttggttgcaaattattttattttagcacttgaaaaatattgtgccactttctctggcctccctgatttctgatgagaaatctgatgttatttgaattttttttcctccatagataatacattgtttccctctatctgattttgagattttaactctgcttagtttttagatggttaatgtgttttggcatgaatttttttttgtttgttttgtttgggtttgcttcacttctggaatctgaagctttatgcttattgtcaaatctgagaaattttcagctactatttctcctagtactttttaagcacttacttctttttctagtccttcttggactctaatattagacacaaatattgaatctgttgttacagttttcataatgcaagttgccatttttctacctcctataatcaattataaactattttttctgcttttgttaaagggttcctcactttttttctagagctcacatttcatccagccccaaagccaatgctacatatttcagggttttgttatgacacttgcttttacataccaatttctatatgtgttccctcttaaggcataaccattctaaaattaaagacttaaaatcacaaccatttataacttttcataagtctaaaggtaagctgggtcattttgtttactggctctgctaatgtatctatggctagctactagacaaaccagagagtgcctggtatagagtagcatctacaaaagaggctggctgacttggctctgttctatatgttcttttatcctctatcaatatagctttcttttgtttcattagtggtggcagagttccaaaaattgctaaaatcacacagtctttgtgaggtttcgtcttggcactcacacactctcccatcttctgcatttcattggctaaagagattcacaaaactagttcacattcaaggggtaggaaaatagactccatctcttcgtgggagaacctacaaaaatcacttttcaaaaagagcagatatagtgagaaaaaagtaagtccactttcacaatgaacctacattatcaataacagtttggccaaaacaacaacaacaacaacaacaacaaacacttagaggccttcttcatgtggctgggtctcagacaaggccaggagctcaatattgaaatcaggttctgggaagaaaagtcagtggactttaaaggcgagagatgggtgttgcagaggttctttgaagagcgtggaatacacccaaactccaacatttgaagatacccctgatttgggttaccaacttgcaggtttatttaaatgcaagatttaaagcatagagtattgctaatgttgctgtttgcagtcctggctctctctggatgaaataatcaaagaagctcagagagcaagaggaaaaaaagcaacataaatagaggcaaaaaataagagaaaagcaataagcaagtaggctaaggcaaagaattcaagcccaagggtgtagaaacggtagtcgaagacctaatctgttagtatcctgatgcattgtgtggctgttgtggcctcattaagaccttcagtctccaggaccatataaagctggactgcatttggaatggtcctggtaatgctttctgaaaatacagtgtgttggcttctactgagagcctggagctgtcagttcctcaggagcttccagaggaattgggaatttcagtaggcttctgtggctaataatagagctagaaaacatatggactccctgcaggctaggagcccacaggtgatgcaaagaggacatcattggcttttgagagcagcagagaaaccttttattggaggtcacacagcaagatcatggatgttgctcagtgggtctgcactcatgggaagcatgtgatcatgggcaatgcaatgttttctggctgcagagagtctagaatcttaaaggtcctcttacccatcatgggaattcattccagaacattctggacccctctcaggggcaggtaagaaatgtctattcattgaaaccgtctaatgcattttggggtggtttttagaacccacttatttagtctgctgtgacctctgatagctcactggggactatccagagacaccatgaagctgcacctggcagcagatatgctcttgttctaatgagttcctcagtttctgctctagtggcttgagctatgcagcttaacgtaatggccccagacatggagggattgactgttccttctgtagagactccaagataataaaaacccatataaatggtcacagatccattcacagtggggttggatgtcagaaagcgctcagggccttggagcagggaagtcatccccaggcagtgggcttagtgaaccattgtcctagacgtggaacacattgtccttcttctttttactttagtttgccatttttataagaaaaaaaaaaaaaactgtgagattgggtcattgcctctgcacttctttctcaagaactgacatatccagtgcgaatgaagctaatgatgagagacaatattttaatgttaattagacattccatgtgtcttagttcatcagagaactattgctcttttatgtatcagatgaaagcagagttcttgcttggagaaaaacagagtacacagtcagaaaggagagtattttcagtgttgtaattattcaaatgattgttgctttttagaaaagcaaaagattttgagagggtgggggatacttagcaagaacacaactgcatgacaggaagccactgcaaagcctctaaaaccctcttctctctctttcagcaaacattgctaaaagctgtaatctccagttagaaaacaaccttgaagggagtttctcagtggcctcattagacaaacaagaggtggtaggaccaagcctcctttggaatggacctgcccagaaggaaaggggacaaaaggtacacagaaagccccctggtgtctgacggcccctggaaataataattggaaaaagaatgaaaacaattgcaatacttctgtgaactcaattgttctatatataaaatgaacatgttggactagctcagtgactctaaatgaaggctacagagttcttctcttctgtgacctctagggagaaaagtagagttacaatgttagggtagtgatgcttttaaattacatgtccaaattagctcctggcattgatgagaatatgttgtatctttctagtaggtagggacaggaaaaggtagagagtgtgctatttgattgtcctgccaactctttcattccttaatttgggaattagttgaccccatttgacaggtgaatcaatgaatagctaaattactgacatatataaataaaatattcatttattttcttttttttgcatttgtagttttggaacaattttacatttacagaaaagttgcaaagagaattcctatataaccttcacctacttacccttaatattcatatctttcatagatgtacatttgtcaaaacatttgtacactactattaaataattccaaactttttttgggtttcacattttcccatttatatcccttttctttcccaggatacaatctaggatactatgttgcatttaggaaatatttattttagtgtgtaaatatttatgctatgcattggtttgatggaattatgagtcaaagaatgatttatgatccccactttacacaacctcttgtctggaaggcataaccacatgtgcagaaacatcgatgcatccttgtccttagatcttcaaatcaacatgctaagtttgaggatgcacagtcagtgggaaggccttccctggaaaaccatgcaggcagtccatattggtgatgccagttatataccagctaagccccacatcctgactgcatggaaatgtggcaggaattggttggtgggatgctctgagcaggaccattcagtgcattggatgagtcagtcaaacaaattactactgataaaaagactcaaacaagttccttctcatcatgtattcaattttgctttactttcttctggttcttttggcattatgcagactcaaactgaagtgtgtagatatcatttgtcataaaaaaaaactcaaataaaactggtgtaacctttttcaaatggatctgctttgatggagatatgggaaactgggcacagcattgaactgctggagggtgaacaaattgatacattcttcaagattgtcatggactttttatagttcagtacatcaaaacatgcatactcgttacccaagttagccaaaagatattcacaacagtgttgtgtataataacaacaaattagaagcaacataaaagtttggccaagattctttaaacaaattatagaacatgatgcaaaatcaatatgcagctttaaaaaaataacattgaagaatatttaatgacacattctattacaaaaatagaagattaatgtatagtataattccttttttcttttttttgagacggggtctcactcttttccctaggctggagtgcagtggcacgattttggctcactgcaacctctgcctcccaagctcaagcgatcctcctgccttggactcccaagtagttgggacacaggcatgtactactacacctggctactttttgtaattttgtagagacggggtttcactatgttgtccaggctggtctcaaactcctgagctcaagcgatcctcccactctggcctcctagtgtgctgagattacaggtgtgaaccactgcaccctactgtccttttgtgttatatatacatatataaaaatatttgtatcttgaaagttatttttactaaatatattaacagtgattacctctgggagcagggagcttttgaacagttttattgagatataatttacataccttacaattcctcctgtttgcttattctagacattttcaataaatgaaattatacagtgtgtggttttttttgtgactggcttctttcacttagcacaatgtttccagggtccatccatgttatagcatgtattggtaattcattccttttttgttgctgaattatcaagttttgttgtatggatataccacattttatttttccatttatcatttgatggtcatttgggttgtttccactttaaggctattataaataatgctgttataaacatttatgtacaagtttttgtgtagacatatatttccaattcttttgtatatatctaggaggaaatttcagggtcatacggtaattatattgcttaactttttgagaaaccacgagattgttttccaaaatggaagcaccatattacattcttaacagaaatgtatgagggtgtcaatttcttcacattctcacccacacttgcccttacctgtcttttagaatatagctaccataggctgtgaagtggtatgtcattgtggttttcatttgtatttcctcaaatgttgaacatcttatgctgattgataatttagatatcttttttagagcactgtcagatcccatttcaatttataactgaatttttatttgttgattatttagttttatgagttgtttatatgtattctgtatatcctgtatacaaatcctttatgatgtgtatgttatgattttcaaatattttctcacattctgtgagttgtcgtttctctttctgaatggtatcatttgcagcatggaaacttttggttttaaagaagtatatcataatgaagtataatttatctatttttcttttgttccttatgcttttggtgtcatatctaatataccacagcctcatgcagatagcaaagattgacttctatgttttcttccagtaattttgtagttttagctctttttttttttttgaaacagagttttactctgtcacccaggatggactgcagtggcataatctaggctcacagcaacctcagcctcccacattccagtgattctccagtctcagcctcctgagtagctgggaccacatgcgtgcaccaccacgcccagctaattttttgtatttgtagtagagacagggtttctccatgttggccaggctggtctcgaatgcctgacctcaggtgatccacccatgtaggcctcccaaagtgctggggttacagacataagccaccacgcccagcctagttttagctcttacatttaaatttattttccatgttaagttaatgtttgtgtgtagtgtgaggtagacgtccaattttattcttctgtatgtggaaatccagttgtcccagcaccgtttgtcataaagagtgttcattctccattgaatgatcttggcacccttgtgaaaaatcaagtgacttcaaatgcacggctttgttttctggattatcagttctactcctgaagtcagtaccacactgtcttgattactctatctttgtagtaagttatgaatttgggaagtttgagtcatcctactctctttttctttcccaagattgttttttctattctgagtcccctgaatattcgtataaattttgtgatcattcctgatcataattttctgcattttctacaaaatggcagctgaatttttacagggattgcattgaatctgaagaccaatttaggaaatattgccaatattcagtcttcctattcatgaccatggacatctttctgtttgtttagatcttctttcattgttttcaacaatgttttacagtgtttcattgtacgagtcttgtacttttttgttaaatttatgttaagtattttattctttctgatgctattataaatataattgtttacttaatttcattgttagattgtttattgctagtatataaacacacaaatttttaaatactgatcttatacaatgctatattgctgaactcatttattacttctaatggggcgtgtgtgtgtgtgtgcttaagagtttctatgtacaagatatacaagataacttaatctgcacatagtggtggttgcacttcttccttttcaatctcactagaatctccagtacaatgttgtatagaagtggcatgagcagacatccttgtctcattcttttcattttctaatttttggcccggagtaagaaagcattctgcctttcaccattaatattgattaataatattgttgattttaaatttttttcttcttttccttatatgtatttgttattttttaaattttaattttagtatttttaatttttttaaattttttatttttagacacagggcagtggtgtgataatagctcactgcaacctggtctcaaaccatcttcccatttcagcttcccaagtggctgagactataggcacttcaccccatgcccatcagctaattctttttttttttttttttgtagaaacagggtcttaccatgttgcccaggttggccttgaactcctgtcctcaagcgatcctcctgtttcagccacccaaatgcgggattacaggcgtaagccacctcacccagccttaaattttcaataatttgcaaatcatattcgtaatataaaagttagtaagaaaaaagaataaatgtcccagaccatagcagttcatcttaatggaggagaaaggcagatatgagagaagggcctgaaatacacactgctgccatggggggggtcttctgattactcagagtctctgcattttagctttctcactgatccaaggctgccagccagctaaggaagtagatggagagaggaccaggagcaccttgtgaatttcataaccaagccacactttctaagccaggagaaaggggagaggtgaccccagtataagaaaatgtatgttataaagccaacggtcactcatagaatgtacacaaccaagagtgatccctaactaaactagagacgttaggtggttataacacgtcactgtgggtttatcggttacaaggaatgtaccactctggtcaattctgtggataaaggagatgccttggagatcgaggaatatatgtgaactctctgcatcttcccttcaattttgcagtgaacttgaaactgctttaaaaaataaagccaatacataaataaataagtaaacaaatttaagcaaaagagatggtgataagcaaaggaattgggtgggtcttacatcgcaaacctttctaagcacaccctaaaataaggctttaagtttaagttgctcatttgggagttgaccccaggaagcaccagtaggggaaagaggaaatgagaccaggaatgggaacaagccaatgtggagagttttgatgtacaagatatgatggggggtctaccggggacccctgggagactgtgtaaaacacacctcagtgttgtcgtcccatctgaggggcaaggaagctggggtgtttgtcttcaatggccactggcttttcactgacacaggcagggcatgccttgcctggcacagtaggcctatctcatgtgggagctcgtcgtgctcttgcggccatggaaagcccacctgcagagtcacagagacctgcaatagaagctctactcatgttcgggaaccgtgagccctgaagggaaatgctctccactaaaggggtaatctatttttgtacaggagttctctttaaccagataactttttagtgaacttaaaatataatatgattttaacatttcagattagcacactttgtgacaaattatggcactcccaaaagagaaacttctcatccagtgctaactcctttccccattcactgtattttgcatggggccaggaataaaattccatggggctcttcacaattttgtggaattgatcaaggaaatacatcgtggtgtccagatcacacctgggtagttggcaaatgtgaatctgaggccaggtttaggagtactgggaaaggttttaatggaaccaagctcaagcactgtgcacagaagctggggtgaggagagggggacaattggggggcaggcctttgtagcctcttttgaaaggagactgcctgtggcctgctctgcaggagccccctccagaatcactcttgatgatcatcagggctctttattgacaaaaactcagcccaaactcacataaaagaaaacagaatctactggtttatttggttggaaagttcaagggattcctttggacagattcataaacaaagtgtctcttcctttctcagttctgctgcttctgtgctggtttcactctcaggcaggttttcctctgatgtgttggtggtcagatcgcagaggccaaggttctgcatccactgctggaggaaagagatgcggtcagcctcacccaacccacgtggagtgaagatagacaaagagccctctgcaaaggaaaattggagtgcagctgccagacgcaggagtgatcctgggcaagtgaaaatgatgaagtcattgtcaccatcaaagtgagtgtagacatgcctctctgcctgtagacatgctcttctgcctttaagacacacttaagttattctttatttattaactatacacccccctgacaaccacacacacatacacatgcttaaaccaattgttatgatttgtctgtgtcctcacccaaatctcaccttgaattgtaataatcctcgtatgtcaagggtggagccaggtagagataatcaaatgatagaggtggttccccccgtactgttctcgtggtagtgaataagcctcagacatctgatggttttataaagggggattccactgcacaagctctcttgcttgctgccatgtaagacgtgtcttgcttcccttcaccttctgccatgattgtgaggtctccccagccatgtggaactgtgagtccattaaatctctttcctttataaattacccagtcttgggtatgtctttattagcagtgtgagagcagactaatacaccagtgttggggctcagaaagcaatatccgaagtatagcattttgacatgaggaactgaaagttccaatgtatacatgttcagtaaatttgcatgccttttcttctactaatcaatctgcctcatgccagtgaggcaaaaggaacaaaaatgaaaatactacatataaaggcagttcttagaacaaaatatatatttttaaatatttgtgttagagaaagaagcctaaaaacttatgagctaagtgccatattgagaaagataaaaaataaacagtattatccaggcatggtggtgtgcacctgtagtcccaggttcttaggaggatgaggtggaagggtctcctgagctcgtgagttcaaggctgcagtaagccatgatcacaccactgcattccagcatgggcaacaaagagagggctcatcttataaaaaagaaaaaagaaagagcaacagagtacattaaagaatatggaaagaagaaactaacaaaggtaagagagaggactaatgaaacagaaaacaaagacacaatgaagaaatcaaatcttatctttttcttgaaaagatgataaaaataaacaatcttctggcaagactgagcaaagcaaaaacagatcaggcacaaataattttaggactgaaaaaagagacataactgcagattttgcagagatgtaaacaatagagaatacttggaaactttatggctttaaattggaaaacttagacaaaagggaacattttctagcaaaaaaatgaaatctgaaaactgactcaagattagggaaaatcttcactgtatatatgtatatgtgtgtgtgtgtgtgtgtgtgtgtttatagtgaagttttgtgtgtatatatatgtatacacatatatacacacacacaaagaacttttacaatcaatattattatttatcatattaataatacccttgattataattataatgatatataattacattatcattaatcttattattaaataagactacttaattttaaaagatgagcaaaagatttgaacacacacttcacataggaagacacacttgccaataattaataagaagtactcaaaattagtaatcctcaatgaaatacaacttaatataacaatgaaatacaacttaatataacaatgaaataacatttcattcccagtggagtggctaaaattaaaattctatcaccagatgttggtgacgatatgtcacaactgaactctcacacattgctggtgcagtgtaaaatgataaaacatgataaaattatttggctgtttcatataaagttcatcatgtacatatcgtaagactaagcaaatccactctgagatatttacccaaagagttaacaccactgttcatgacagaagtacatataatagtccaaagctgggaacaacctaaatatacgtcaaggggaaagtggcaaaaccaattgtatatattcatacaacgtgacactacttaggaataaaaagaataaactactaatacaccattaatatggataaatttcaaaaagactactttgagtataaacagcgagatacaaattaatccatattatgtgatcccatttacatgacgttctagaaaaaacaaagctaatccatgataaactatttcttagcagtggcagtttgcggagagcatgaggaggcaatgactggaagggtgcatggagaattttcctagtgatggaattattcaaaatttttgtggaaatgtgggttatgtgggtgtatgcacttgtcaaaactcattaaattataaacttaacaataatgcattttacgatatatgaattatatcatagtgaaaatatcttaaaaactggcccaataaagataagcaaaatgaatcagtggctaaatatccacaaacgcctacacacacatgtgcatacactcaactagcaaacaaataagcctaaatggttctacaaagttctaccaaacattccagagatggattgcctcagtcttgttgattccacaagatggggggtacttttctccacactaaaatcaggagttcatctgccttccagcatgtggggtggctgtagggtaggaagacctcagagaaagaaggagaataaaacaatatgaggctggaggacagccagggccatacctgcgggtcctagaaacatgggcagcagacattgttggttgattaccgcagagttcttctgatgtccctactttattgctaataaaaccctatttttgttcaggtagaaggagaccttgagaatgagtgcatgctgggccctgcctcaatcccagaagatgaatcttcatgagtctaacttacagacgtgccattctctttgccatgacttgttttaaagaaaggcagctgacaaaatacaggccaaggggatgtgaatgaagtcccatagtggaggagtggtagtggctggtgggactttcagaaatgtttcctagactttaaaaagggaccaagagaagggaattctgtcatctggctttgagttctgccatgtgccagtgtggtacttggagttcttgcagagatcttcaagccaggaggaccagtctaggggacaaaacccacattgaggatgccaagaaagctagaagaaagctactgaaccaccaaattaaccaaatatgcacacttcttctggatatttacataagagcataaatgttcccaagtcattcttaacataagttgatcctgttcccttatcactcgctccccaaagcactctaaatacttccctataatagggatttgagtatttacggtaagagcaaagggaaggtactgacaaattttaaagaagggatgcttgaattacggtttaaaatgatcactctgcctgcagtgtgaggagtggactgggtgagaagaaaatggggagggggataaggagccaatggaaatactctgcagaagagatgaaacatatgacatctaagaccctggtggtagaggtgatgatggagagaagtgaatcaattcacatatatttagaaagaaaaatcttatatgttgcctcctccagaaagccttccttgattttttttttccaactggatccctgctgcattgaactctccatgtgttaaatcttccaatgaacgttgtgtggacttctctttagatactggttctgactcagggcattcaaacatgttcctcccagaagactaggagccccctgaggactgagaccccattctcgctcatctctctttccctgagttactgatccctggcagccactcagccatctgtggtcagctgagctgcctgccttgcctggaggaacgcaggtcccacagctgcctctgtccggcaggcaggcaagttgtaccttcagttttcatccacccgcctgtccatctgtacctaactcatagggagctgacatggtgctgtgtggaaacaaaccgtggagcgaagggcagtgaggggcaccctagccctccatgcatggctgcaaatggggagactcaccctgcctctgccaccttgagaaaattactgttcccctctgagcctcagtttatccctctgtaatgcaggtggaggtcggagagtggttattcctcaggattgaccgtctggttgaggtgtggccttccttccacaacaggctcccaatcacgtcctttcttccttggaattgatttctactgcaagaagctggagagagttacatgaggaacccactgacagatgacaaaagcaagcctttgcagagcacttttgtttttctttctctacagattcacattgtgcgtgttcagtgagaaacagaacacagggctgttggctttggagggctgtttattttgaaaatgcaggtagatggtgggaagggtgatggagccattcgcagacaatagccattgtttgtgcccagacttcgaagtggctgcagggctgtccttggcctccccttgggtcccatgacacctggggagcccggctggacagaccctttgcaggttgcctgactctaagacataccagaaggacataaataatcagccaccgactctttcgctcgactataaaaagcgtgcatatgctctgcgcaggttttcctaaggtaagggacagagctgggcaaaaccgggcttctggagctgcccatatggggaggcggtctttcaccgacgattctgcagacagaaattgcccatctgcactgtttgcaggtgttttgaatgattatattattagctctgtctgttcaactttgcttttttatggtggctttagtattgcagtaaaaaaaaaaaaaaagggaagacgaagaagaaagaaaaaagaaatataaaggcagccatctggttcccgatttgtgatcgtgttctctgtcagtaaagaggggagaggcagccactgctctctcggggggtggggcaagcacagggcagcccccagttctgcccttttccaggagagtgggatttggggtaggcaagatttttcattttaccagaggaagctggtttattttctaatttctcctcccccgcctacaccttgatgctttgcagctgctgcggagctcacctgggtactggaatcaatgattgatgtgtcccccagagctgcagcctggcctggagaactggctgtgtgtgtgtccgtgtggccccggagagtcaggctggggctgtccatcccacccatgactctgggccttaatttgatctgtgctgtgacctgtgaaacttctcagggcatcccgactgcaggtagcaagacaaagatttatttgattatctgtgcataggtaattcatcagggaaatgctctctgtgtcagatggcgcagaagcggggttatttagggttgtgcagcgcatccagggctgggagggtgccaggagccaccagcccagcaaggtcatgacgcctccccgctgcaggagataccaggcagatccggagtcacacttgagccagaggatgctgtctgccttttcattggcttgggcaaagagaagagaattgtgtaggatttctttcccccataaaagggcagaaacaatgctccgatgtaatctgaggaagccaacagggggtgctgacacccaaccttctcttctcttcaggtaccctaccctagggacagacaaaccatgacagtaaaaagtattctatagataagatatattctaccctatatacatatacaaaactacacaatatatatacattgctcttgtgacctgtctcctgcaacaggcaatcatggtgacacgtggattcatttgtcagttcagtgaaagaagcagcatcagccatgggcctcttagagatccagaagccagaaggaggaggctggaggaaggctccagagaaaagaatccctaaaaatacactcccctgattgtagaactgtttccatttggcatttctgattgcaacgagcagaatcccacccaagcatgcagcaggaaggcaggcttcttgggtgttctattagggtgggagctgaatttggatctttgcattctctccccactgcatctcacttcaagaagtgaaccaggcagtttgtatttctttctgtggggtacaggtgcagagcttacagcagaagctgggaatgggaagaaacccttttcctttactttataaaagccgaagccactgaagattgtgtccacagggttcctgaaggaatatggatctgtggaaagcagcaagggagagaaagatcgtcctttaacctaggaagaggaccgaagccagagcctggggtggtcagcactctgccctaggtccttgtcagtgcctggagttggtaggacattggaggtgatggatccatggtgcacacggcatggataaaaccaagtcttgtggtacccagccatggcaattggttatgtgagcagcagaatttatagacatcaaaaactatataaatgcaggtaaccactgtagggagaagaaaggtggggtggagggccttcctgggacattttgctttgcataacacctcacagtctttgcctgaccctgaaggagtgggtaaagtaaggagctcctcatataccagaaatggtgccttcttattgaatgaagcgattgtaaatcaagggtcgaatgtctttgattgagtaatagtaagaaatgagatactttggcaccattgagcttggagctgcaaattcacatctgtagaggcgtttgtggggtgtcaaaggaaagtttaaagaaagacaagatcaggagccacaatagcctagagtgagaaaggaggtcaaggaagccccaaaggcctcagcagtacaagtctgggttttgactctgtgatccatggaagttataggtgtggtgccaggtttaacatatacgagtgctattattatgtaggccaaacaagccaaatgctggtcatttcagactgttcaaattgatagctgagagtgcacctttgggattcagactgcctgagtttgaagtttatcacctttatttattagctgtaaaatactttgcctcccttccttcctgccttcctgcctgccttccttccttccttccttccttccttcctttcttccttccttccttcctgccttccttccttccttccttcctttcttccttccttccttcctgccttccttccttccttccttcctttcttccttccttccttcctgccttccttccttccttcctttcttccttccttccttcctgccttccttccttccttccttcctttcttccttccttccttccttccttccttccttccattctggttagcctccctctcttatctcttattccctttctccctccctccctccttccttccttttttttgcctcagtttcgtcacctgaaaaatcaattttataatatttgcacctgctgcaatacacctgttagaggattaatacagatgcacaagactacctgccatgcaattggtgttcaataaacattagccagagctattctgattgttgttaccctcagtatatctgcttccttcctttctctatactgagagttagtatagcttagagttaagagaacaacatttgtagccatacagccaggattcaaaacaaaatgtgtgaattatttaacattattaatctcatcttcatcatatctggttgctgtctttacttcttccttctgagtaaggcttgtcttgggcttgctgtggtcccagctcatcattggtatagaaagaggaaagaagccagggccttgggtgatcagcactctgccctagctcctcagcagtgcctggagttggtaggacattggacggagtggaagcattgtgcacatggcatggatgcagccaggtcttgaccctcagccccaccataccaggcatcttgtttcttcactccacaaggatcctcttagcagggcccacactccaccagggacaagaaaggactagaaaattttcctgtaggtcaactcacccagagcctgagcagagaaagcagcagcttctcccaagcatggactcttccaggagagatatccttgcgggatgcttcacctgctcccagttgaccaagaggctagagagcctgtctttggtgtgcaggttcccttaatacaccatggaatactatgcagccataaaaattgatgagttcatgtcctttgtagggacatggatgaagctggaaaccatcattctcagcaaactatcacaaggacagaaaaccaaacaccacatgttctcactcataggtgggagctgaacaatgagaacacttggacacaggaaggggaacatcacacaccggggcctgttgtggggtggggggaggggggagggatagcattaggagatatacctaatgttaaatgacgagttaatgggtgcagcacaccaacatggcacatgtatatatatgtaacaaacctgcacgttgtgcacatgtaccctaaaacttaaagtataataaaaatatatatatagaaagaatttttatatcaataaaaaaaacttttctttattttcaacttctcaatgaccacacgctcctatatttcccaaactcccctgccctctgcaagctatctccagaccttcccaaaaggtggacctggaggtttgaacaggtcctcattagcacatggctttgctccttggtgtgggcaggattcttgttaactgcagtcgggactgtgtgcagcatgcttaggccaccccatccatgggtcacccctgggctgtctggtcagtcatgagtctgccctcatctcctcttctcttctgtggccatcagggaacacacctggctcaacctccccttctttatgtactccccttctctctccccataatctctgggggcctgtccatattcccttgaagtcactaattccaattagaatcaacactgaaaactgctttataatctattccacttcagaattctcccactgaacaatcctctacactcagcaattttcatgtttttgacttcttattcctagggcagaaaatcagattgatccaagtcatctactgagatgccctctcctggttctcgaatccgcctccagctaaagggtggagttccgtggagcaaaagaggctgcctcacagtgcctagctagcaggggagctgggcagggagatgtctcccacaagtctgcacagggctatctctggtcctggggccagcgtgtgcctcagcatttgtcttttacacataagtggggtgggggaaacccacttctttataaaggcttggaaagaagtagagctccactgtgcaaactcagccacataaaagcaaaactagtccagaatcctcccctgcttcagtgtcctgaaacttcacactctcctgagtttcttgcacaccttgaggtctttgggttctttgaatggtggcccaagctcaaatgacctcagtgaagcattctatgatgccaagtccagggcaggttttatttatttattttttattatatgctgtcttacagccatgacactttcttgaagagccactgtgtctttacatttacacgttcctcactcaatctttttctcacccatcacatttctattgaagccctgttagttgctcttccaaagatcaagccactgcgttcacgtggtttacaatctagaggaggggatagggcagaggcctgtggaagagagtgctgtttcatgcagattggtcagcgaggcctttctgacaagttgaccccacagcagaagtctgaatgtagtgaggttgtgagctacaaggatacctggggaatgaaacttctagccacaggaaggagaatatgcaaaaggtttaagacagggctcttttggcatatgtgaaaaacagcaaagaagttagtatagtggaagctgatgctgagtgagtgagaagtgactaagagtcagacaatctagggccacataggattctactgtgaaagacttgggggccatgaaagagttcccacagaggaggagtaaggtctcacctcagtcttcatgggattgtgttacttcagtgctgacagcaccagttagaaggtcattgtggtaatccacttagaaaacaatggtaccacttctgtaatcccagcactttgggaagccgaggtgagtggatcacttgagttcaggagttcgagaccagcctggtcaacatggcaaaaccgtctctactaaaaatacaaaaattagctaggcatggtggtaggcacctgtaattccagctacttgggaggctgggaggctgaggcaggagaacccagtgaacctgagaggcggaggttgcagtgagctgagatcataccactaaattccagcctgggtgacagagtgagactccgtctcaaacaaacaaacaaacaacaacaacaacaacaacaaaacacacaagaaaacagtggtatcttgcagtggtaatgcttgggttggattttgtctttttgaggtgggatcttgctctgttgcccaggctgtggagtacagtggtatggtcatagctcactgcagcttcaagcatctgggctcaagcgatccttccgccttagcctcccaagtagctgggacaacaagcacataccatattttttgtaaaggtctcagtatgttgcccaggctggactcaaactcctggcctcaagcagtcctcttgcctcagcttccgaaagtgctgggattacagacatgaatcaccacacctggccagaattgatccttttattgttttcagctactgatttgaagaaatttgttacagaagctaacatgaatttccctgactaataaaagcagtctacagaacagacagggttcctgccttcagggaacttactgcctagatgggaagacagatattaatcaaaagtaatttcttgctcaaaatccaatgaggattagacagctgtcttaggaggtttcttccaagtggtgactcagggattcaggatctttctacattatgcccttaacatcttggattcttccaggtccatccaagggaaagggggaaagagagtaattcaagaaaaagtatgagctagagaatattgtaagagtgttttaggggcaaaatctagaagaggtgtgcatcacttttggacatcacatttcactggacagaatcagtctcatggactcaacctttctgcaaagaagcctgggatatgtactcatcctagaaggcaaaatagttcaagggatgaagccaggcaaaagtgcagcttcagctgaagtctagccccagcctgatctgaaactccagagagtgaatagcatcagaattgtcctattctgaggacagggtctagtcttctgtactcctcgtcagtcagttattggcctttgagcaccctagaagaagggtataacttccaatgtgtttcagaaaaggcttcccgtcagctaaggcaagggttctcaaccaatgcttggagatatttttgcttgtcaaaactgggtgtgggggctactggcatctagtgggtagaggctagggatgccactgaccatactacaattcacagactagaccccacatcaaaaaaaaaatctggacccaaaatgtcaatggttccaaggctgagaaatcctgagctaagggcagtggtcaggagaagaggacagctatgagcttctgggagtcatgctctatgaatttgggagatgggtgcacaggccagggatctgggtcgggtgcccacagtgcctaacctatggccacagaagaggaaataggagtgtggggcctctagtcaatcttggacacactgttcgactccagttctagaacagcaccttgcacgtggtcagcacccctgacagatttgggtgaatatgcatttttacaactcctgggctccaggctggcacaaaccttcaacctagataactgacatgatggttccaaagaaggatgcctgggaaaacaactctgaatagggcagcctgatggaagtggttcttctgacaccaggatctcaggttgtgctatgcgatttcttctcttatcctggcaattttagtggcaaatgctatgtgattggggctgctttagacttcagagaggagtactagatttagctgctgagacctcaattctgctactgaattataatgactgcatgagcagaccaagtcttctcaattttaggacgctgggttcttccatttctacaagaacactgtgcacttccatttttcttcaactgcattctaaagcattctgggttctctgtgatgtcagtgccaacaaggtcacttctgggggaaaagaggcagaggtgaggggtgaactatcccagcccctgtataggcactaaccagagcagccccacatttagctgttttttaaaatatacattagggttccacatgagatttttgttccatataaaaattctgctgcaaaaacttgaatacctgtgcattggatgacatggaagttaccatggggaacagagacgtagtgcctgccctagggacttacatgcatgtgttcaccacaggccataattcaaggctggaagagtgagggatcaataaaagagtgcaaggaaatttgctattccaattaacaggattatttgcatatatccatttaatttaacagtataaactccgctgtgacagtttagaaaattgggagttatccagtgtggtgccatgcaactctgccataaaatcatttctcttctgatgatccttttgtttcttactattaggagctgcaagtggtgagggagatataatctattgttctataactatccacttgcccttgcaagcctttcacttatgaccaaataaagacaaggcctgatttctgtatataagcttcttaaacttggccaggcagggtggtggttcaggtctgcagtcccagcactttgggaggttgagttaggaggatcaattgaggctaggagtttgaggttagcctgggcaacatagcaaaaccccatctctcaaaacaaaataataataaattagccaggcttggtggcatacacctgtagtcttagcttctcaggaagctgaggcagaaggatcacttggacccaggagttcgaggctgcagtgagctataattgtgctgctgtactgcctgggcaatagagcaagaatctgtctcaaaaaaaaaaaagaaagaaagaaagaaaaaaagttcttcacactcactataagttaagcctcaaaaattctattgacttgaaaatggaagccccattctcatgggggtcactaagatagaaagagaaggatatacccaaagagccgttttctcactggatgcgagaccagagctaaagccctcctaggctgcctacattctgaccctcattgcattgtctgggcctttggaagtcatcttttttgggatttctgagcaggatcctaagaggtgctcattttagctgaagcaggatttaagaaggctgccacttagaatggagattagggttgggtttgccatcccagatcaaaacaacagaaaagaagaaatagattaaagaactccatggtttatgttaaaattgttgaactgaagccatgagacagacattgtctagcaagcagacgctgcgggcctgccttaaattatacaacctaatgtcctaaaataagcccagattcagattccaccctccttggtctgtctctctcttttcttctctctctactcatttcacctcattttattcttacaagcatcttaggagacaggtttatttttcctcccactttcagagtgaagaaaccgagacttagagagactgagtaacacgttcaaggtcacacagctaataggttcagagactccatcaagattctttccaaatagagattccaagagccatttctgtattaaataatcagttcgctcctcgtttgtggagcatgaaaaccctttagacttgccgtcttttgtgcctttgctcaagaaggccatgcacttggatagctccatttcatccccatgaaacccatctttctagaccagaggtccccacccccaggccacggactgcttactggtccatggcctgttaggaacgggctgcacacaggaggtgagcagtgggcaagcaagtgaagcttcatctatatttagagccgctccccatcactagcatcaccacctgagccccgcctcctatcacatcagctgcggcattagattctcaaaggagcaggaaccctattgtggttccaagatggtggaattgagctatttgggttgaaccatttgaagttgccagtaatctgccattttgtaacctacctattgtgcgagggatctaggttgcatacactccttatgagaatctaatgcctgatgattggtcactgtctcccatcacccccagatggggctgtctggttgcaggaaaacaagctcagggctcccactcagtctacatgatggcaagttgtgtaattatttcttcatatattacaatataataataatagaaataaaatgcacaataaatgtaatgcacttgaatcatcccaaaaccatcccctcccccatctgttgaaaaactgtcctccacgaaaccgatccctggtgccagaaaggctggggatgctgccctagaccatttcccagggcccttcctcagacaggaaatgactccattgttacaacctcattttgaaccgttgtgacgtcagctgtatccacctactgtgagaacctctgtttattgcctcacgacacactggtctctaagtttcctggaggccagtgttgtgtttttgtatttaacacagggccccatgtgcattctgtaggtctgggtaacgatggtggaattgagctatttgggttgaaccttttgaagttgccaataatctgcccttttgtaacctataaaaactgtaatttcatctgattcaaaataaataaatcacatttttctgcattggggtttatgacattaggaaatgattctgaactttatacagtgatatgtgctcatttgaatatgttcaagatactctaattataacatcctgttttagggatgctatgatttagggaatcataggttttgctcttagggttttctgtttgttttagttatttttaaaaaattaggaaaagagtcttgctctgtcacccaggcaggagtgcagtggcaccatgatagctcactgtagcctcgacttcctgggctcaagcaatcctcctgccttagcctcctgggtagctgggactacagtcatgctccaccaaacccagctaatttttaaaattttttatagagatgggggtctcgctatgtttcccaggctggtcttcaatctcgggcttaagcaaccttcccacctcgaactcccaaagtgctgggattacaggcatgaaccaccatgctcagcctactttttgtgttttacgttcaacaccttaaaatgttaaagatacacagaaaagtagagagacaggtctaatgaagacctagactcactccttacctgtttcaatgattatcaaattcatgaccacatttgcttcatctctatcccacccacttcccctctccttcatcccaattattgcaaagcaatataccaaggtatcaagccactggaaaatagttcagcatatgtttctaaaggaaaaggaatcttttaaaaaataaccaaaacattttaaaataagttaacaatgtcttagtatcatctaagatgtatacacacacacaagcataaaatcaaataaaatacaattagacaagctatactttgtttcagggagggagtaaggtccacacattgtgtttggtagatatgcttcttatgtttcttgtaatcttgttttccttcctagctagtgctttaatcaaattagttctctgaagtgtcccattgactttggaggaaactgaggccccaggaggttaaatggttgtgcccaatgtccccaagcaagtccatgactctgaccagggatggagtccagatgtttgagagtgttcaactttcctgccccagccccaaggcccccgcccaggcccactgaggagggtccaaccccgggtgccccggacccatcctggggtcattggaatgccctctgcagatcactacttcctgtttgcctttccatgaggcagtgaacactgctgtgaaaaaggttcaaagtgtttcctgacacacaaagcctctaaaaggcaatattttgatgatttaagtataaatgatcagaaacatgtggatttcatttcctttagaatacacttgggtatgaaaattaacaggaaacgtgcttggcaaaatacaacctgggtttcctcaaagccctgaagtggtttaagatgttcagtggatttgaagggaaggtagccttctctctgtaccttcccaccaggcttgcactcgcccacacattaaatctgggcaggatttgctactggtgtggccttgaccttgttgagaaaggcagggaggaagagaaacaggagaaagaggagggagagtctgggtaagaagtaggcagcttttcctaactggtgctgccttcccaagagggggacctgacctctttccttggaaacagccctcaacaagtccctactgggtcctacctgtcctcaggtgtccagccatgctttggccccctctgtccctttccctgagaaaaaccacttggagttacagaaagacatggcacactccacagagaggcttctttccatctttacccgtgttaagataaggttcattccatgatagaggtaggcagcttcagagctcccagaagtcccagagcacaaggcagtgaaagatcctggtagagcaagaggagatggagaaggagaacctgagggcaggagaatgctctggagggagagaggagagaggaggaaagggaagaataaacggagtcagaaaggaaggtaagagagggatagggagactagagagggagaaaagaagggaggaagggtcgggggagggaagaagggaggaagagaagaaagaagagaaaaaagaggtgagagggaaggaggaagggagggagagaaggaggggagacgggagaaaggaagagcagaagggaggaatgagggaaggcaggcgtgagggagaaaggaaaggaaggagagggaaggagaaaagaaggaaggaagaaaaaaaggagggagggagagaagaagggagggaggaaaggagggagagagaaatggggggaaaagaagaaaagattggagggaaggaggaagagaggaagacaagaagggatgggaaaagggagggagggaggaagataaaaagaaagggaaaaggggaaaaagggagagggagaaaagaagggaaaaaggagatatagaaaagagagggaggaagagaagaatggagagaggaaggaagaatggagagaggaaggaagaaaggagagagaggagggaaggagtagagcagaatagagggaagaaggatagcaggagggagggaggaaggaagaaaagaaaagatgtggggagagagacagagaggaaggaaggaaaagtgtgtgatggccggtgggaagggtagacaaaggatagacacagagataggcagtggattcctggttaggatttctggctctcaagtaatgtgcttgtcagcaagaatgtccagaaatgcccctttaactgggcgtactgcaaaaagtgtgagaagcattctgggagtgggtgggtttcacgaactggggtagtcttcctcactctgcttttttgttttaatcatcagtcagcagaaatgtctccagaggccttgctgcttgccctgattaatgaacttcagatctttctgtgccctggggttctgcccatcatgagcactgggcgggatcctaacaccatcactcctgggaccagttttcataagtgggcctgctaggcatctgcaggcagggcttggccacctcccaggagccaggccctgctatgaggtagcctgaggacaggacagaggactggaccacaaaggcagggctttccctcctggggacacacccaggacaggaacacttttcctggtggaactgtgtgggcagaaggggcaacatgaccagggggcaactggaccagaaagacagggccaacaggaccagaaaggcagggcttaccctcctaaggacacagccaggacagaaacacttttcctggtggagctgtgtgggcagaaggggcaacatgataccctcagtaatatgcctgcctgggtcaagatacaagtgacttggtttggggttcccctaaaacagagcgcaagataaggctttgagggcaaggagtttatgtagggggtgaccacaggaagcacagagagggtggggagaagtgagacagagaaggaagaaaagccaataaggtcttgttagtgaggaagttactgcagtgggcaactggggcccaacagcacgggtgttcctctggcagacgctatgaagaatgcgcctcagatggtcccacagaaagataaggagctgaatgtgcatccaccacatcctgtcccctgctggtcaggtggctcctgtggctgtcacctccctcactctctggtcctctccccagcatgctccctaggccaatgtagtaagttatgagcttaaatgggaactatcttcaagctgcttctagagtatgctcagtagatcttggatcccttggataggaatcttggcagggtccctataccagtcccacccttgaggaaaacatcgatactttgcccagatgaacaggctgaaagctggtgagtgaagggtgccaagtagcagaggcccataattgcacctgtcctggcaagagatgagcaatgaacagtttatcaagcatcgcccagcatgcaccaagcacttatgggcccagcacccattcaagggacttttgctccctggactccagcctcttctgcccaaggcaagagagaaagaactggaaaaatacctttgctctgggctttgcatggcctggatcaggttcacagctaattagaagtaaatgtgaagcacaattatgtatgaaccttcggtggccaaattcatgaaaggaataacgggtatatgtttcctttctgtagaattttaacaaacaagtggcattgtcatccattatttatcttttttcaattgcagtgaattgttgcagtgacaaatatccaatttctgtatttacagaaaactcacacatgtgtagatcatggtacagtttcatatttactgtataaagtactgacttgtttttttaaatagagaaatttggtaattattgctctatttcttaagatgtgaaagatgatgcataataaattgataggccatttcttttgtgctcccgtaaaaaaaatagccagccagcttctccttggaaatcgtggctctttatatttggggaaacttaacctctagcaggatgagacacctggagagaacacactctaggcacacagcagatgagcaacaaatatatgtttataaaatttgttggttgacagagtcacggagaactggtattgtttttaaataccccaggcagggttgaagacacaccttgaaatatacactgcagtcttgggcccttagcattggatgaccacacagtcatcacttgttcacatcttcaacttggttacagttttgtgtaggattgtgagaaaaaggagcttgcaggactgaaggtaaaaacctgcacagcatcgtaagacaatcctccaagctgactgagcaaccatggctctcttacccaggcttcttggcctgggagaaatgaagtgtattagtccattctcacactgctaatacagacatacctgggactggttaatttataaaggaaagagatttaactgacacccagttccaaagggctggggaggcctcaggaaatttgcaatcatggcagaagtggaagcaaacacatccttcttcacatggtggcagcaaggagaagtgccgagcaaaaggtggaaaatccacttataaaaccatcagatcttgtgagaactcactaactatcaggagaacagaaagataggggtaaccacccccatgattcaattacttaccactgggtcccttgcacaatatatggggattatgggaactacaattcaagatgagatttgggtggggacacagccaaaccatatctgtacctccaatgtcgcttcattcattcatctgttctaatggaatctactacaaaagtcagacgtgttgattgctgaggaggcacagcattacacatggccttgttctccagagactcagggcttggagatcaaacatagccatggacggaagctaacagtggaacgtgttcaggatgatggcagagtctgaaccaattgtacgtagcaggtgagcaaaggaaggaggggccataaggaccttcaagctcttgcccatgagctggcctctcttcttctcttatgtgatgtgtactgactaagtgtggctcagtgtaagagaaacaagtagatgtcaaagtaacttgtgttaaaatgattccatctatttcaggagtccagttgtcatttctaagcccttgtttacagatgctttctcttgagtccagtaacatgtgaatactatattctgtgagttcttgcttttaaccccacttctcctgagttccctacatttgtaaaaaagaaaaaaaaaaagaaaaaaaaatcaaactaattagataactgaaccacatgtaccttccctaccctgaaaagaaaattgagccttctgaacttgtcatccctactacctcatcccatactctcattttcttctttacattctagcaacaaattttcatatacgtacacaaaaacaaaacaaaacacaataacaaacaaaaaataataataagagtaagagagagtgcttgaaggggcaccagctagaccaagtgtgtgggcctccaatttctcagagtctggcttgaactacttacagaacagaggtccttggggatcacacttgggtctgcctgtgactatagagctccccaggatatgagccccggaccaaaaacagccttttatatgaacccatgggctccaccatgaacctggtcctaaaaattagcctcttgattttttctttattattatcatttttttttttttttttactgagcagctgctatcaatgacttctcaagttttgctttctggtaactaccattccaaagcactctaaaaaccaattttacacttaataaattttaactattcaatatttttcattttaaaactaaataacagacatttaaaagagtatttcttttttaatgacactcatgccactattttagaaagtcaggtgacattcaccatgcattcctatctccttaactgccaaatactctattagtcaagtttgttcatatttacaagattttttttttggatgttttactgctatcagaagatctaacatctgtttctccagggattctccatgtgttctgtagtttacaacaattgaaaccactgttttcgaaatacatttggattaaactcaatgtactaagactcaatttcacagggagccccatgcacgcgtctggggttttctctcatgtaatttttccgaatggtgagacatttgctctggatttaggtgggtgagatagaataacagtggagttcaatggagtgcatgtgtaaaataacgctgttaaaggcccaagtgtggggagggtttctgggagtccctgtttctgcctggagcacaacagaagaaagaaagctcctttgactttgctcttttgggaaccacagtggcaggggcaagtccagcacatcgccttgtgtccttccctggccatcaacaacaccgtccatagacctttctgtggtgatgggaatgttctacatctacacttcccaatatagtgttgccactggtctctggcagcaatttagtgttgaaatatggccagtgagactgagcagctgagatttttattttatttaatattttaaatttaaatttgaattctaatatccatgcacgactagtggctatctgtattagttctttcttgtgctgctaataaagaaatacctgagcctgggtaatttataaaagaaagaagtttaactgacttacagttcagcatggctggggaagcctcaggaaacttacaatcctggtggaagaggaagcaaacacatccttttcacatggcggcagcaaggagaagaatgagtgcccagtaaaggggaaagccctttataaaaccattagatcttgtgagaactaactcactatcacgagaataggatgggagaaaccacccctatgatgcaattatctctacctggtccctcctatgacacttggggattatgagaactacaattcaagatgagatttgagtggggacacagccaaaccatattactatcatttcggacgatggaggtctacatgcctcagctactctgagatgtgtctccactgaaccctctcttatttctccagaccatcaatgtctctgatctacactccttcaatagaacaaattacaccactggtcccaaactgttgactactgtgcccagtgtcagtccatatgccattgttgtacagaccagaaaaggggctcttcctaaagctttcttctctcaagtattagaaagtgacataccgacatgcaaattcaccagggcacagatataacaggcaccccataagcatgggcaatgtgtgtggcctgcccaactccaactgcacgtacttgtcctgttctccatgtggtttccaatccttggatgtgtacacagcatacagactgctgacagcatgcagactgctggcaccatgagaacactcaccatcttcccccaacacctcacggtaacaagcagaggtccaaacaaaccacggagtcctgacaagaagctgactgctctgacaatcttcttcctgacacagaagtccatttcgtagtagtgtcatttctgtggggtcttcctgaagaatcatcatccatcatttcctgtaggatatccctgtgtgccttcagatatagggaatcagttacaaagccccacttcagcctctgctttgtggaacggagatcctggagtgctgtgaccagcttaggcattgtgttcatgatggaggcagaggtcaaagggtgcaagccaaagtacacaggactctgcaggtctaggcatggggtaactaacatgccaccacttctgctgtgggttttggccaaagcaagtcacatggggtgaagaagaacaccctaactttatgagaggaactccaaagtcacagagcagagtgcatggacacaggagatggaaaggagcgaagaactggaccatcgttgcaatccatggctcacaaattctaaagcaatgtatactgagaggtgaacactggatgtcttggcagcaagaacgtgaatatgggtgattgttattatctttgctttatctatattttatcatttcattttacagtgtcaaattatagaataggtataatttaatcttaataagggaaatagactcatgaaaacaatctggaaaatatagaaaagtagagggggaaacccacctaaactgtgtttttcaccaagatggttactagcattgtgagtgagacacttctttcttgctgaagactgtctcgtgcattgcaagatgtttaaaatctttggttcctggacatccaatgccagtaatggcttcttgtcatttttgcaaccaacttcaccaccaccgccacccacatttctaaatcacctccagaggcctccctcattgagaacacagaaaaccacatttatctttttgatgtggttactctttggcttttacgtgcatgacattcattcattcactcattttaaaaataatcgtatggttttacttatttattgttcattgttttccattgatatggtacaccacatggataatgttgaatatagatttttaaattcctatttaaattaataatgtacagatgattctgcatgtcacctaaatggccgaaagtcttctgatcttctcacgccatctggcctttaacaagaaaacatttttaaataggtacctaattggctgtaaaaagtccattgcattccccaagacttttcgtagctttctaaggtgagggaggggtgcctcccttcttgttgctatggctttagtcactcccttccatctctccccatcatcccagacacctctactatctgtttcctacagccctgccctctttccccaccacttttcgtggacacctctcttctcatttatttatccaggaatttcttactcaagtcattagtaggtaatagactgttactacacatttggtgataatggaagatcactgctgcatggagctggaaataaccccaaagtgtgtatcaggaatcacagctgctcaagttcaatggccactatgtgttttagggcacacttcaggtttgcagggagtacttactcgtaactttcttgcctgcaagttttgagtcaatttagacacgctccagtgagggaggaagatatcggctaaactgttggagaacatagcttgaatctgcagccaaagtcagcattctgatgcgttcccctcaagctgacaacctgcgagttcttacccagcctactgcatggaggattgtgacctatttttcaggagaggctggttatagagatcacataagggcagtttctttaacacattaatcccacctgatagaaaaatactgaccagcgagagtccaactcttcctattccctatcagatggatctctctcctttctgaaggagagaggaggacaaagatcccctgaatttctggtgagtccagcgctcttttttgtctccatcccaccgttaaactgccttctcctttattattttcatctcttctccaacatccagtgaacaatgcctccctcttcttcctctttctggccacagaaaaataaaaatatttattgctttgaaagtcacatccaatctgatcctgagttactgttataccttaaaggaatccttgtcaaagatgttgaggaaattcttccatatttcattagtaaaagaaatttataatttatacacacaaacacacacacacaaacacagacgtaatgttaaccaaaaaactctattgtgtttccttactcttgtacataaagacacctttttaaaaaaatgcattgaagatgaaaaacttataaaaatgactagtgaaaaataaacccaaagattcagggtatgagaaaggcccaagtgcactactgatactattcaataagtgagcctttgtataagagatgaattaaactaacagactaaggacaaaaaccactctgttccaacttcccaaaaataatagaaaaatattttaaaacaaaattaatagagaataggtacatatggacagtgcaaaacaagaaaatgtggatcagcagaccagaacatgtgaggaattcctagaagacagaaaccagatgggattagagtgacaagagtagatgaatctatagccaaaaatcataagcagcgtgcaggatgaatccccacatggccttggctcacccagctcttccccctttctcacttgtagttctcaaaaataactatagaaagtgctgggaatgtaacatcctgagataacgaggaactggctagaacagagcgcgggctgttcctgttcgtcctagaacacgatgtccttcagcgcgttagcccagaaactcaattgtgcctgggtataaaacccagggcagagtagccttttggggtccgtcagttccagggcaatgtaatgtgagacattgagataagactccatctgccccaggagcagatttcctgagccctaggggactggctcgccttgaattccagacacggattttcccttgctggctatctgtaggtaataaagttgctttaattaatttgctatgttagtcttctgtctccctagacttgtgcaagtgatagaataaccagtgactagtgaatctactagagaaactggggcttacacggtgaatcctgcttcacacaccccacagttactctgaagctaaaaacaaatgcaaagaaatcctaaagcccaggttagaagactgcaattagagcagcttccaggaaattctctcctgtcccctgtcccaccctctatgcaactcacaactgaacgtctatcagctcagtccatgaaatgccctccaaggaaagtaaaccttctggtcggggcttagtagaaggggatcaccagaagtagtagagggaggctgaggaaatgccaagtgtttataatattatacagttccacaattagtaatgtagttatcaatttttatatgtttgttgttcattgggatttctctataaagtttctgttcaaatacgttgttccttttttattaggttatctttttaaatttcatttttgtttttatattttttgagatggggtctcactacagtgccaggctggagtgcagtgatgagaatatggctcactgtagccatgacctcccaaaccaggcacctcagcctcctgagtagctgggactacaggcacacaccaccaagctcagctaattgttgtatttttagtggagatggggtttcaccatgttgcctaggctgaacttgaactcctggggagaagtgatccacctgcctcagccacccaaagtgctgggattacagatgtgagtgacaatgagtatgcctatgtgtcttttttctatatatatttgaaataattctgtgcatattctgggtaaagatcatttgctaatttgtgttgcaaatgtggcttctcatttcataatgtctcttctaagttctgtatggtatgtttaatttcctaattttaatgtggtaacatttaatcaatttctcttctttatcattagtatattttgtatctgtttaagaaatatttttctgcaccaaaaccttaacatatgctcctatgttattttttgaaagcttcgtagttttgcttttcatagttagctctataatccagatacagtttattttgtcagtggtgtgaggtagggattcaattttaattctgtttccatataaatatctttgaggtgggaggatcatttggggccaggagtttgattccagcctgggcaactttttgagaccctcatctctacaaaaaatttaaaaatgagctaggtttggtggcgcatgcctgtggtctcagccactcatgaggctgaggtgggagaatcacttgagcccaggaggttgaggctgcagtgagccatgatcatgctactcactccagcctgggacacagtgagatcctgtctcaaataaatcaataaataatatataagtttataaaaatatgaatatctttattgtctagggacatttatttaaaaatctactttatcccattgctcttcagtaatatgtttatttatgacttttccattctattgtgttgatcttcaagataccaaagacttattatagaactagtgtgatattggctacagatagataaataaataagtcctcttaccactttcttctccttcgagagtgtcttggggaaaaacacttggaaaatattgagtctttcccacccatatttttcaatctttattatttcgtttaaagtatgatttagcaaatagcaaacaggtggcctttttttttttttttttttttctttgagatggagtcttgctctgtcacccaggctggagtgcagtggcacgatctcagctcactgcaagctccgcctcctgggttcacgccattctcctgcctcagcctcctgagtagctgggactacaggcacccaccaccatgcccagctaattttttgtattcttagtagagacaggatttcactgtgttagccaggatggtcttgatctcctgaccttgtgatctgcctgcctcagtctccgaaagtgcttggattacaggcatgaaccaccgtgcctggccacagatggctattgttttttaaccctgagagttgctggccttcatttactccagcaattgctggaatattcatttagggcattagtccattttcatttagggcaggcactaatacacatgatttcagctcctccatctaactctgtgttaattgctgcttgcatgctgtggcatcccctttccttatgttgcttgtttgatcatgtttctgttcatttcacttttgcctttcctattaagaagttctacagtactttcttttacattcatagcgaatttccttcttgttcctttattcatacacatattacttaactattattttatagtaaattagcaatttttccccatcaagatgcacttccattacaatgtcttaatttcctcctacctcacaattccttaatgagagctgtagaacactttgatgtcccccaacccttcccatgctctatgccttcttattgcttcttacatgatctttgatattattttttccttccctcctctctacctattgctgtatggtagaatttattgaactagtttacctattaaaatttctgttaatttgtgtgcctttccctttgtgtatttctaaatataattaaacttccatatatgtgcatgtgtgtgttgaatattttatgtttcatatattagtcaggttcactgatcactactctttttattcatttttattttttatttttgagatggactcttgctcttctgcactcggctggagtacaattacatgatcatggctcactgcagcctctacctcccaggctaaagtaatccttccatctcagcctccgagtagctaggactactggcatgtgccaccacacacatataatttttttttgtatttttgtagaaacaggatcttgccatgatgcccatgctggccttgaattcctgggctatccactactctttcttctttctttcatcttgtccatcttaattttttcattaaactcttttttataggtattctcctcagatgagatacttaggtgatgtactttctaaattcttgagtacatttctttcacacaattatatttatgatctattcagtgggcatagaagtttcagtttgtagatcttttctcttacatatctgtagacacagttccactgtcttctagcatccagtattgcagatgaaaagtctaatgtctctaatttgtgctttctacttcaaagcatgaatacatatttatttttctgtaaaatccaagaatcttatcacataagtctagatatatgtttgtgggtatatgtgttttctcatcaatttagtccaatctgtttaagtactttaaatgtgcagatatttctcagttcagggaatttacatattcattctattttgtgtttaatgaatgcctcttgtatatctgctttttcttttcccataacttatttcattcatgttagacctcctagatttatccactaaccttatttttttccaccgagtttataatctctttttacttttttctctgttctttcaaatacctcttgatcttgatctgtgttactattaattcaatcttaatagtaacaaattgcttatttaatttatttactattttttagttcaaaactcatgtttaaagccctgaaagtattttatactgaaaattaatttgcttaaattccacatttaaaaaaaaatcaagatattcatcaatctcacccagcagtctcttttactgggtttgcatattaattattctgctcaatcttcttcattaaggtttctgggcatttttaaatgggacattattattatttatgagtttatagagttgacttagcttgggctgttgcaggaatcctgtggatgataaaagacatggtgaatgctggccctgaaagcctggggagtccaggcagctgtcacctgccattaaggcacctagagagatcgctagctctctgatgtccttaaacatatccagccgtaagttcagggaggtcacagttcaccagcagcttactctttgtcctttaagaatgtccataggcaagccctcccaggacattcctgtcctcctccggagctctgttgctactgtttggttgcttgtctagcatctatgcttcctgccaggtctatgatattccaaatactcacaccaccaagctgaatcctatagaacccagcagccctgtgctttaggagaggccagcagcttggattaggaagtgggggagggaaaagagcactggattcactgtgtctacagattcgccttgacatcatttgccagggtgttccaaatcatccttcactgcaggtacgaattcagtgggacaatgtccagggattttgcacaaaaagaatttcgaatccagacatttatatccaaccaagcaattattccattgaaagggaatagtaaagatgttctgatttgatcttttttatctgaaaaattgttcagacaatgtaggagaaagttttcatgactttgggttaggcaacaagttcttagatatggaatcttaactatactccataaaaaaaccagaaaaattggacatgatcaaaattaaaacttttactccaagaaagacactactgagagagtgaaaatataagctacaaaatggaagaaaatatttaaaatcacatatcccataaataacttgtatatagaatatataaataactcttaaaatttgacagtaagataagtactcaatctttcaagtgaacaaaaatcttaaaaaggcacttcactgaagagaatatatggataacaaataagcacataaatagatgtttgacatcatcattcatgaggaaaatggccacagccatacaatacttcatatttatttgaacagctaatatatataatatatacaacttatatatgatgtctacacaatatgtattatatattcaatatatacaatgtgttcaatatatacattatatcatataatgtgtatataatatataatatatcatataatgtacatataatatatacaatataatattgtatatatacagcaatctatattgtatgtctattatatatacattgaattatatacattgtattatacaaaatattatatataatacaatataaagtattgtatatattatatattgtatatataatatataacatgttatatattatatacattttgtactatacattataatgtataatacatattatatatgttataacatgtaatataacatatattatgtaatatattatataaattatgtatcagacaatatcagagaaagttcaccagttacactagaatgtttgtacattgctattgagtatccaaaatgatacagccactctggagatacatgacccaccaatttaacatctcaacatttactgtagagaaatcaaacttacatttatgtaaaaacttgtaagcaagtttatagcaactgtattcacaatcaccaaaaactggaagcaaatcaaatgttattcaatttgtaaatgaaaacacaaaccatgatacagccacacagtggaatactattcagcaatataaaggaatcaatgtaaaaagattaatggctttcaaaggcattatgctgagtgaaagaagccagtttcaaaaggctgcgtactatacaattttatttatacgacagtcacaaaaattcaaaactacagtgatagagttcagtggttcccaggaatgaggactgagagactgatgtgactagaaagaaaagcaacaagggagattgttttgtgtgtgatactgttctgtacatgtatggtagtgatagttacagaaatatatatatgtgttaattttttaagaaatgagcacacacacacaaaaagtcaattttactaaaaatttgtggtggctacatgaatctatatctatatatatatatgttaactttcttagaagtgtgcacacacaaaaaagtcaattttgctaaaactgatgatggctacatgaatctatatatgtgtcattaataatgctttttataaatgtccacacaaaaaagtcgagtttactcaaaactcatttcaaaaagaaaaaagtaaaataaaggcatggtggatcaaacctaaagctatgccttctgactacttctagaaatggggaattgataacacagaaggaatacaattaaaaatataatatgttttccagagctgagtttttaaagtactttgtacaataaataaaaatatatctacatttagacataccatatcagtatacttaggataataaaatgtcaaaacattcagaaagtgaaataaaacgtcctttacaaaggagcaagcattagcctggcatcatgtatctaatactttatactgggtgcaaacaaaaacaaaaacagggcaagacttttaaagttctgggagtgtggttagggaatctgagccaagtgagagagaataataaagatattttcaggctgcatggactccagaaacacctcaaagacacttttactttggaagtcatttgatgactgtagcaacgtggagtaaaccaagaaagaaagagatgtggactccagataacagtggatccaaactaagaaatggtggatgttctatttcaggatcactgcaactcccaagcccagagagcacccggttcagacgcagatggaaagatggtggctgcagaggaaacgaaaattggagggttatgtggaatgactgagacactggaaaaactggggaatatgctcaagacgactagtgaagctggttgccagggtttgttttgttttgcttttcagaattaattgaaacttgactgtgggtacattcttccctgtgtgagtggcttaggggtcatgatgttggactcctggtgaaagaattgcatcttaatattctactttgttctgctgtcagcaacttttatataatcataataatggaaagacattgatcagcctttgacttgtaaaatcaccccatagacaaatcacggaacgtataacttattacagtgcaaaatgtaaatgtgatgaatcttgacaaaataaaagaggtacatttgaaagaggttgggaggtgaaaattgaagaggttcagagtactaataccttcattttacaaagttggaattaagaatctacagttgagctaataagaaatgatgtagcatctaagagagggattctgaaaccagactgcctgggtttgaatgtcagctctgccatttattagccatgtgaccttgggcacattacgtaatctttctatgctcccatttcccaatctgtaaaatggggatattagcagtatcttcttcaagttgcttaatatatgtaaagcacttagaatagtgcttaatatatgtaaagcacttagaatagtactgtatatgtgtttgctatgagctcagagatgaacaatagaaaaactggtaagatgagtgacaaaagtaaacgggaggaaggatatagaaacataatatattgcaattgagcaaaaaatccaatccaacaaagaagttagtagacaatgtctacatccaagaattcgaaaatggtaatttacaggtatcacaatagtgatcagatttataaaatggtttatttctggtaaattaggctgtgatttggtgataagagtgaagtcttctgaactgttcagttattcagccatggagatgtagtcttttgattttttgttaaaagtatgtggctggattaataatataaataagtcatctcactccagttagaatggcaatcattaaaaagtcagaaacaacaggtgctggagaggatgtggagaaataggaacacttttacactgttggtgggactgtaaattagttcaaccactgtggaagacagtgtggcgattcctcaaggatctagaactagaaataccatttgacccagcgatcccattactgggtatatatccaaagtattataaatcatgctactataaagacacatgcacacgtatgtttattgcagcactattcacaattgtaaagacttggaaccaacccaaatgtccatcaattatagactggattaagaaaacgtggcacatatacaccatggaatactatgcagccataaaaaaggatgagttcatgtcctttgcagggacatggatgaagctggaaaccatcattctcagcaaactatcacaaggacagaaagccaaacaccgcatgttcttactcataggtgggaattgaacaatgagaatacttggacacagggcagggaacatcacacactggggcctgttatggggtgggggtctgggggaagaatagcattaggagaaatacctaatgtaagtgacgcattgatgggtgcagcaaaccaacatggcacatgtatacctatgtaacaaacctgcatgttctgcacatgtaccctagaacctaaagtataataaaaaaaataagttgtctaactgctaaatcacttttgtgatgaaattgaacaaggaaaacttaacccaataaaatgaaaggaagcaatacaaacaaacaaaaaatcatagtaaacggaaaagattaaataaggaggcgagaaataatcggatatttaaatatttgtgatcactgaatggactaagtggtcctatgtgtcagccatgaaaactcgctgcatgggagcacagtgggtgacagcatcaccagtggcctctctgggtcccccactgcgttccctccaaggccacctgagcctcaggcagctctcagggatacacatgcagtcccgtttttacaggacatgaggtttctctaacaggaaatttggctccaagtctcaccttgaccaggctggaactttcttggatctgaactgcagtcagagactcttcctctccagtcattccttccccttctgcttccctagtggtcagacctattcactttcaaaaggccctccctgacttctgctttcgactttattctttacttgcactcttcgaataaacaacatgcatgtcttattccttctttgtgttaactttttgaaggatccaaattgacatatcctaccagaagatatggttctctgatttactgattaaacaagatccagcatgtagctgtcctcagggatgcaactgaacaaaactgcacagaaaggctgaaaataaagggatggaaagaaaatgcacaagatagaggcttacacaactaaaaaggaaaatgcagacaagtggagctaataaaaaaaaaaagaaaaaaaagaaaaaatgcagcaatattgatatttaaacacagaaactgaaaaattcatgatcatagaagatgactttaacgcaactatttgagaaaatacagatcaaatcaacagaaatctgcaagaatatggagagtgtgagcaaaacaaataaataagcctcagtgatatacacacaaacacactctttcataaccctaaactttttaacactcacagaacatttacaaaattgtattatgtattaaacccaaaaattaagataaattacaaacaagcagaaatcattcaaaccattgttctctgaccataataaaactgaataagaaattaatattaaaagaaagcaagagtgtgggctgtggggtggggaaaagcaacaatccacttggaaaaattatttaagtaactcttgatttaaagaaaaaaactcaagtcattaaaaagtcataaaaagcaataaatgctataaatgtcaaaacatgtgggatataaccaaaatcggactcagaaaaatatatagctataactgcattttttagaacctgaaacaaaacaagttaaacaaaagctaggtataaacaaagaagtattaaaaaaaaaaaacagtaaactctaagaaagtaatttaaaaaaaagaaacacagaggaaagtaattaaacagaacagcaatatgaaaagcacaacttaccagtgaatccaaaagccaaatctttctatgtcaacactgaggacaacagtaagaaagtggacggggccaggactgttccaccaaatgcccctagagtgatttccttgatgtaactcatgtcaccattttcactatgaatgtgggtgcctcataacgtgtgccatttatgcaagactaattctgtgttcctatagtgttgctttcctccattgcattaccttagcacctttgccaaaaaagtcgatttaacatatatatatacgtgtggctgtattttttggctctcattccctgttttgaaactttgctttcaaatgcatacacatttagaattatttcctcttggtgaattcactcctttattattttatagtgtctttcttttgtcattgatagtactctttgttttaaagtctactatgtctgatattaatgtactcactccagttttcttaagatgaatgtgggcatggaaaatccttttcccattcttttatttttaatcatctatgcctttctatttgaagtagttcttttgtagacagcctatatttgtttttagtagtagtgctctttatataatctgacaatttcttctgacttttaattggggtatttaagtcaattatacttattgcaattatagataaatttaatagtaccgttttgttagttctttttgtttcatctgtttttttcctctttatgcctacttttgaattcagtaattttatgatttcattttatcttcactatttgcgtattagttacgcatttttaaaaaatttttagtggttactctatggtttcaatatacatctttaatttctcaccttcaaataattttatactgcttcaggtataatgtaagacacataatattttcataattgcttcctcctttctttgtgctattattgctgtgtattttcctttttaaataaatttcataatacattgttactattttcacgttagatagataattatattttagagtggtgaaaataagaaaaaaattccatttttatatttacttcatggttgctgtttctagagatcttcatttctatatgtagatccaagtttctatctgatattacatttcttttgcctgaagaacattaatatattttgtactggctcctattggttaactgtgaattctctcaggtttgtctttttcttcctatctggaaagtgtttatctcacatttatttttgaaaggtattttagctggatatagaatttggagttaatagcattgtttccaatactttaaaaatgcctttcgattgttttctagcttccttagttactgaaaagaatgctgctgtagtttccttctttttgaaaagcgtcttttcttttcttgctgccttcaagactttttctcttttttcatttttttttttttttttggcagtttcacagtgatatatctaggaggggatttttgtccttatcttttagaattttttctgattttttgaaattcttggggctttgatttggtgttcattgctaataaaaaaaaaaaacttgaccattatctcaataaatacgttttttacctcaccttttgtcttctatggcattccatttgtatgcttatttaacagtttgatattatcccgcaccttttaaatgctttgttctgatttatttttcactcttttctcttccttttgtgtttcaatttgcataattttattaaattgtcttcaaattcactgattcttctttcagttgtgttgagtgtactgatgagctcattaaaggaattcacttctggtatgtattttaaaaaatatctagtatatccgtttgacttttttcttatggtttccctctgacggcagaaattcccccatctaattacagatatgttcatttttttcccactggatcttttatacattaatcactgttattgttaaattgttatctgatggtttctacatctggttatttacgagtctgaccatgagttgcgttttgttttctgctgtgtttttgttgagactgtgtgtgtatgtgtgtatgtgtgtgtgtgtctgtgtgtgtggtgtgtgtatgtgtatgtgtgtgttgatcttttatatatcttgtaatttttgcctgaatgttggcatcgtgtgtagaccagagatactgagataaatagcatttattcctcaatatttgcatttttcttgttttgtttggctgctagtacggtttgagtcaatctagtcagaaattggttttattgttgccatggttaccctccatgcacaatctttaacttccattagtaatgggttgttttcattttgtgcttgagtgcaggctgatgagcctaaatacgtttctcagaattactgctacagcctcagattttaaacaatctttgctcacctgcaccacaggaggggtctctcaccattcttttgcctcttctacagtggtagagtgctgttgcttcttttggtgcttgtcagataagtagtaattgtcaacgaggcttctctcttgtccttttccagccttaatcttataaaagtcttctgtgccgtggcacaaaatggcaaataaagacataaaactacacccaactttattagtcattagagaagtgcaatttaaaaccataatgagataccactacatccagaactaaaattaaaaagcctgagaataccaaaagttgaccagtatgtggagttactggaaccttcatacactgctgttgacaatacaaagaggtacattcacttggagaaaacagtttgggactttcttataaagctaaacacatactgaccatataatggaaaaatcccttttaggtattttcctaagagaaatgaaaatatactttcacacaaagacttgtttcatatatgttcatagtagctttattcctaatagccccgaacgggaaacaactcaaatgtctatccactggtgaatgggtaaacaaattgtagtatagtcatacaagagaatattactcatcaataaaaaagaaattactactccccataatatagaagaatctcaaaagtattatgcggaatgaaataagccagacatataaaacttctttatattatataattctgttgatataaaattcccaaatacataaaaactaatgaaagcagttgtttttgtcatcatggtagagaccacaaaaacaacagctttcatggtagagagagaatttactgtaaaggagcctgaagaaactttctggagtcatggaaatattctacatcttgatgttggtggtagttacaaaccatgtgcatttgtcaaaatttatcaaactgtatacttggaactggtgaattgtgttgtatataaattatacccagtgattaaaagtaaaaggtgaataattattccagttgaataaggggagcaggcataggctgggggaagatctatgctcttgaacccttctttagctgaagcacttcttaggaaccactaaacttccatacatctcagtctgaaaatcagtggcttagttttccccacttgcacgcacttgaaaatgagagccagaggggatgtgaatttcccaggtcgtatagtttaataatcagctctaggattttaaccagaattacataaggaaccaacagaattttaaggagagaatcaattgtcttttattcattgctttcatcttctaagtaatttatgattaccaactatatatatgacataaagctgctattggagtgatatacaaagaaaattcacatatttggcactctgcataccttcttttgagaattgaatttcacatgggatttatttctctttctcaggagtgattcagactgactgcaaaagtatgtcttttacagcaacaacaacaaaaacacatagagattcagttatgaatttgaccatctgcccctggtcaaatctccactgcgcacaacacactcagattatcagtgacaaaactctctggatgagtgtgctttccttggagctgctatgaaaacaaagggtccagggagatgttgggatgcagccaatccttgggggctggtaggtggacaagtgcaatggaatttgagattagggaatcccactcaccgcttcttgcaggagggaccatctcttttctggagcttcaagtttacccaggaagattatcacaggttcagaaaactgttttattttttaaaaaatgaccattttgggattcgcttgccttttcctctttccaaagaggaatcattcttggaggctctgacatcagcacccctcctactgctccagcacagccattaatcacccatcaaattcctgccttatttccttttggccttggaaattgtatgtcttttcttttggccttggagattatatgtctcaagctttcttggttgcttcttttttttcccctttctttttttttggctttttttttcttttatgcttttattttttctttctgagagatgaggactagggaggagaaagccattgtcaattaatagagagacattttcaccaggtgtttctcaattatcacattggcagccagccccttctgtgtaaattgtactgaggaaaaaaaaagaaagaaagaaagaaaaacacctctcagtacagacattcccctgggattgtaaccagctctgtgtcttctttcctcggaaggacagtcatcctctgggaacagccctgcttagaactataagcaaagccaaggctgtctcctgcaacatcatgatttgaatgtgttaaagtgtgtgattattattaggtcttaaacattctagatttgctccctcattccacacaagtttcagaaataaacccgcaactagtctctaggagagactgatgcttattctgtgtcagaggcctggtccccagacgtccccataaatttgtctgctggaagaccataaacataattctgagcatggaagttatttagatttgaattaattgccttttcagttgttttcaaatatgcaaattgaaatagccaaaaaaaaatgtacattaaaaaaaaaaaaagcagtccattctcctggagagattctagaatgtcctttgccaaggtgatctgctttttgtcaaagcagactaaaaggcaaaggtgcattttttgaaaatggcccgtgtatgtgtgggtatttcctcctgctctgacattttcttagtggggtgatcaagtattttgtgttggtcagagcctctttgacttcaacaagccaccacaaaatgaagtaagattattaaatcaactgtggatagtaaaagtgccttgatcagctcttggaggctgtaggaaaatgattttgtaaagaacgctgaaggagaatgcaggaaaagacacactcatcatcactaaaagtcacctaatgacacaagctaggcaatcggcgttcttctcatcagtaaggtcagaaacgtctctgcttacagctgttatgacccagcaccctggcttcgatggagacctcgagagacctcttggggggaacatggtggtttatctggggacacaacttgtaaacatccctcatctaggaatttccatgaaacctcctgagcttggagagatgcccagcttgtgccaactcctgtataacaagctccagatgctttctctactccatgccaggtgggattccctgaggtttgcccttaacccatctcctcaaagcccaaagtcagggatggggcagttctggggttagacacttgcacggggctgcattgcatttaccccatgccctgctccaataagtgttcagcttctggttgtgtccattcatagtctgcccagacagggtcaagtttagcgaggagaagggacttcccctctctctatgacgtcactaatcagtaatcacaggtcagctggtcacatgaagattcagtttttgagcagatgtgagtgcaagtcctgagctaggaaatacagaagtcggagaaaaatgtaatcttaagctcatctctttgccttaggccagttccccagaagcacagcctgagatggaattctggggctaatgacttattggggaagtgctctcaggagaagccagtgagaggtatagtttggggcaagggaagaatcaggccaaggtctggttgtagctgaatcctggcctcaacttgagtgcactggaagttccgggagggtgcacagtcccaggttagtctgggttgtgggaagagggtgagcctctacacatttatatctgtctgtcatgggctatggatggcctgcaggaaggagatcacaatctcccagtgtctctaggcaaggcagctcctgagggcaggtctcctgggggtggagtgcatctgggagcacccatgcttttagcagtggactgtgggtgctcaggctcattaataggcatctgggcaaagcaataggacagtgaagatgcagctgtagtggaaaacaagatggatgcatggtcataatggacttcctaatacactcccagatgtcagccttcagctgtgcagggaggggagaggtggtgcccatagagcagatgcttccccagccaggggacacaaggccagggctaaggccaggctcaccccagtgacaaggatgtctgccctgcatctctgccacatgaagcagtgaaatagcagctcttttggcacacaggggaaaagccaggatcaaggtccggcctttcagcagcacttacctgctggagtctttgtgtatcatgccaagccctccctgggagctggagcatcctgaagtcctcagggactcttctggagcagaggttgcaaactgcatgcccaagagatgcctcctcctgtgaaaatcgtgtgtgtatgtgggcatttaaaaaaaaagagcatgagacaaaatttaaaaatctggagatttctcgtaacacctgggcttttaggttttgctgttgctgttttatgaatctgatgtcctcaccataaggcctgaccttcctacctggacgcaggtgtgtggtggctgtgcctttcatgtagggtgtttactctccaggttgtcagctttctggcccctgaaagtgtctacaagtgtgacttcagaatatatgcatgaagactcaagattgacagaggggccaggcatggtggctcaggcctgtaatcccagcactttgggaggcccaagcgggtgtattacttgaggtcaggcatttgagaccagcctggtcaacttggtgaaatgcacgttgctcacctgtaatcccagctaattgggaggctgaggcaggagaatcacttgaactcaggaagcagaggctgcagtaagccaagatcgcatcattgcactccagcctgggtgacagagcaagactctgtcaaaaaaaaaaaaaatcaaagattaaaagagggacacacactgacctttgcaagcacagattgtcacagaaatgaagagaagccccaggcatcagggccttagggtcacaggcagagcgaggcctccccaagaggagaaagaagccaacatggccaagaggtaagacttggtcccagaatgcatgatcaaaacccagaacacaggcccatgtcttcctgtcgtcctcattgctctggcacttgacacgttgttcttgtgctgggccagggtcagtgggtttggcctccacagggtcactcactgtatgacctcatgtccctgcccattgcttctcttcatccagacctcaggttctcttacctgaaccaacactattgtcccatctcccctcagccgcccccttcttctcacctccaacctctacccctgttctatcccagcctccacagtaatctgctttcagctcagcccagatcatattccttccttacacatttttcaggtgcccccaaagcctggggtgggtcactggacatcaccagaggaatctgacccatgggtcatccatgtgaaaggacagtcctgatgtatcaggaggctgcttcttgggaaacttcgggttctgagttaacacagtaaagtaaaaactctcagtccagccaatattctgctcaggatgtgtctatggacaccacaggctctggaaggaataagtctcgggggcccctagtggaggatgtgcatccttggcccacgtcctctgcaccagagctgttaagtggggaaggcaagcagctggagaagctggggaggatgctggagacccatcctggaaaggccctccatccctccacccaaactgcatgcactagaattgacttgtgctctactgggacacccaagcccagcctgcacctgcacatactcagaaacagtgaagcaagaggaacacatgtttgagttctgaaacacacctgagaagatgcttcctccaagcacatatccattatggtgagtgcaatagtgatatcatccaaagaatagaatactgaaaggcacattatgcaaatgtgcattcccaattatggattcatctggaagcttccaaaacttctaagacctcattccaggcttagccaacaaccagtgctacctcagtgattgcgcgaacattacttctaggataaatttctctctcatcaaatgagggaccttaaggtccatgccttgcccaaggtcatgttgccagtggggctgaagggcagagagaacctctctgtgaggtgtggtttcttcctggcagctctctggggaggcctgaaactctcgtggcccagggacaatgctgttggatgtggggtactggcaagtactggcattggtgattaatagataatgaagctcaagatcaggggatttcagaaatcttcccaatttcgggcaactaaacttcaatgtataaattcaatctaatccaagaattttttttggaaaatgatcattataaagtccatttgcaagaataaacatcagaaactgtaatgacaattacaaaattaaccaaacctacagtaataatagaacaaacaaaaaagaaaagaacggcaagcttgctgtttcagctagtaaattgcaaaataaagcttcagtaattagggtgaaatgcaggtcacaggttaacatagtgcttttgattgtatttggagtcaccccagagtttaagaaaaatacggatgcatgggtctctctctcaagatgctgatttcattggtctagattaagtgagacctgggcttcacagtttgtaagtgctctttagattattgtaatcagcagccaacggttaagaacaactggattaacagaagggaatcaactggagagactgtcaaaaatgcgtgttcctgtatctgggtccactgtttcaggctctgagaagggatctatgaaaaataaggcatgcaacacatatcaaagttttggaagcactggaaagtccttatacaaaagagagtccttatacagttctgcatacatgtaggcattcagtagattctaaagttgacagctcaaaacaccgaaggagagatatagcaagggtgttagggtaatccactagccatttggagatcaagttggatctccagttcacttcttccaactaaaaccataagtaaataggtttaactaacttataatattgtgctggagaaaggcgttctaggctttctaaggaagatggaaactttatataaagaagaaatgtaataaatttaactacctaaatatgaaactaagtcatgacctacaaaaatatgtaaactagaagtagcaaagtgcaaaaaagaaagttgtcacacatattacagataaaacgttagtaatcttaatttgcaaataaagaaaatttaaaatgaacataagccaaaaggaaaacaacaaatgttcagtaaaaaattaagcagtaaacacagagaggtaaattacaaaataaaatgtacagtcaatacattctaaaaaagatgttctacctcataagtaatcaaaagtgctaaataaaaatcaaaatgagtcatctttttcacccatcatattggaaaggattaaaagtttgacaaaacttaaaaatagcagggatgtgggaaaattgacattctcttgcactgttgttagaaatgtaaattggtattcctttctggaaggcagtttgtcaactgaaattaacttttttaaaaaataagaagcatgccttagcctagtaatcatatgcttgggaatttattctaaggagataattgctaagtggtgcaaagatatagatacaatagcattcattaatgcttttaatagtgaaattttagtagcaacataaatatctataaataaatgattggttaaataacctataatatatgtatactaaaaaagcccccacatttgaaatagtgtatttctatagatttctatttactgaaatgatggttctcttttactcctcctccttttgtacacattatttcttctccttgggcggcccattctcccacactttcatatttggttcactcctgggagtgcccaaccaactgaaattgccccttcttctgtgaagtcgtcccttcccttctgagccacataagtagtcaccactcttcatacccaagacatccctttaccattcccattgcagcacttgttcactcatttattcaatatatgtatcaggctctctacagggctcttaccaccctctaaagtagtttactctgccatggccatctttcccactggattgcaaacctttgcagagcaagaaagcgcatgattcattctgttaccccagattttagcttgggacttgatatatgcccagtacaagcttaatgaatgaatataaggaagaatgaatgaaagaaagggtgaatggataggtggatgaattggaggaaggatggatagatgaataaataagtgggtggattaatgaatagaaaaaaggatggatgaatgaatgggtggggggtagatagatgagtgaatagaagaacatggatggatggatggatggatggatggatggatggatggatggatgaaggaatagaaggaaggatggatatattaacagatgtgtgggtgaaaggatggatgaatgaaacaataaaataaaggacagatagatgaatggatggctgaatggatggatgaaggaatgggtacgtgggtgggtagatagatggataaaataatggaagaaaggatggatggataaatggatgcaggtggatgggtagatggatgaatgaatagaaggaaggatggttagatgaacagataagtggatagatgtatgaatagaaggaagaatgggtgaattgatgggtgggtgtgggaatgaatagagggaaaaatgaatgaaaatggatgggtgggtgaaaggaagaatggatggatggatcaatagaataaagaatggatgggccgggcgtggtggctcacacctgtaaccccaacactttgggaggccgaggtgggtggatcacttgaggtcaggagtttgagaccagcctggccaacatggagaaaccctgtctctactaaaaatacaaaaattagctgggcatggtggtgcattcctgtaatcccagctactcaggaggctgaggtgggagaatcacttgaacctgggaggcagaggttgtggtgagccgagatcgcaccattgcactccagcctgggcaacaagagtgaaactctggctcagaaaaaaagaaaagaatggatggatgaattgattggtggatggatggatggatggatgagtgaatacaaggaaggatggatcggtgaatagatgggtgagtaaatgaatggatgggtaaatagatgggtgggtgaatggatgtatggatgaatgaatagaaggaaagatggatatatgaattgatgggtaggtagatggatgagtgaatggatggatggatagatggagactgggtagattaacggatggaataagtgagtgagtgattgagtggtagggaagacagatgatagatgaaagtaaaaggattgggttgttgaggagatggaatagatgcataggttagtagatggattatcagatgagtaggtgagcaaatggaaaggatgccatgttcctcagtccatcttcttgccattctgcctcaggaaggacattcagataactcttatcattaaacacgctttccacagctatgtattgggtctacaaaatgttaaaagttatcaaagctatgtaactgtttgaaataattggttttaccataacaaaaaggaacagaataaaaacccctctaaaacaaaaagcaacaaatttgtttcatggaccttgaacatgttcagaagccaacaggggagaaagaagcagctcagagattatcgacagtaagaacccacttccatgcccaggcctgagtgagaaaggaagagctcagttaccagatccaggagcagcccacagggtggcatctggggccatcctgggctacaccagtgggaggcagttgcagagaaagtacaatcagtacccaagtgagaggacaacacccttgcttcacttttcctcctcccctaactcacccacctgtgcctctcactggccaaacccaatagggaatcatctgacaggggaacctggaaacatgggctccaggtatcagcagagcagggaggagtgatgaatgcatttgaggacaaacaggccaacaactgcacacccgacaaaattgaaatcaataaatatttaaatgtgtccacaatgtcacattatttgtcagccaaacaactgcaaatgaactcttacatatgttatgaataaattatgttgggtgtgtgtacattttaatacagctgatgtggtagaggggaggagcgcctggggacaatgaggccttcaagtgaccctcccaactctcttcttgtgcaagtctcaagattcagcttcctgttctctaatagaataactatgggcaaatcactcagtttccccctctttaaaatccatgtcaattttccaggatcccagtgaaatgaaagtgaaataatgtttgtagaagtacccaggaccccatctgacctgatggaagccatcgttttaattgcttctaaggggcactcagccagccaaaggaggcaggcacaggtgcccttcatcagaccactttgtcatgacataacaaaaacctgaagaagtacatctttctgaaactaaaaatcccacatccatcaactcatggcgaggacatcatggtggacatgggcaatgatttaatgacaaggacactcaccccagcatatttatattagtgcacatattatattcctaattattgagcaggaacgggtaaattaaatgagggggtatcaacacaatggaacatggagcacatatgtgtttttgtatggaaatgtctacaaatttgttttcagctgtaatctctgaaatgaaattatgggtattgttttctttgctttctttgctttaaaaaaattatcagtgatagctgtgccagttcagctgtgccactgacccagcgccacagttcagaaaagagcaatattgacagagcagcaactaaggacaaattacctgactgaggtccttctcagtgatgtcactctgcttgctgatgaactggacgctcgtggtggcccccgggcaactggcactcacaggctggaagagtgggtcttctaatgaatgcctcgagggtcctctgtgcgctgccacctgcatggccaccatctacagtcaacaggtacaaatcacaaaaataacctcccctcctggtctacaaggacattaagaccctggcttcaagaccattcacagggagttatatgcagccatagctaacacacatgtttgtaaaacctttgtattttctatttgcctttagttttttcccccaaaatttgagatagcttcagtgcattcctgaggatcagtacctgctaaaaagactctgaagcagaagttggcggtgaaacccagggagcctcaatcaagtggctttccgcaggcaccatgtgtggctttggtgtagccccgggagcctctttacctctctgggtctcagcaccttctatctgaaaggtaggatggccatgatgaccctggaaaccctgccatggctctaaggtaagataactcctctgattcagtttttagttttagtctgacatagtgaagcaatgatttaaagctctaaagccagcatgagcaaatttttttctgataagggtcagactgcaaatctcttaggctccatggccccgatgatctgtcttgcaactgctcagctttgctattgagcacaaagcccagccatggacaataagtacacaaatgagagtagtcatgttctgagaaaatgatgttgacgagaccacctggtaggttggattttgcttgtaggtcctagtgtgcagacccttgctctaaagtaaactgtttccaaagacttaactagtgactgatggagataattaaaaatgtagacgacggtaatgatgatgaagataaaaataatacaagcctctttacttccttttatgcaaagtgcatgtgtgtgtactaaaaattaaaatagcaccagtggcgatcagcaaaaaaatgtctcctccacccctaaagatgttcattgcttatccccagaacctacctcaccttacacggcaaaagaaattttgaaattgtgattaaggtcatgaacattatcacagagagatgatgttcctgatgatcttggtggacccagtgaaatcacaggagtccttaaaagcagagaacctttctggctgggtcagagagagatctgagcatggacaaaggttcaaaaagaactcactcctctgtggctggctttggacattgagaaaggatacgaagagagcaaaggaattcgggcagccataaggagcaagaaaaggcaaggaaacagattctcccctagagcctccagagaggaatgcagccctgctaagacttcatgctcagccccaggagatggagagaagtgtaagataataaatatgcatcacttaaaccatcaaatttgtgataatttttatagcatcggtagaaaactaatactctaactccctgagaaaaatttggatattacaaagtctaatctcacccataatgtcactacccagagatacccactattaacatacattagaaatattattttagattcctctgcatatatgtgtatgtatgtgtaaacagagaatatatacacattatatataatatatattatgtactactatatcatatatactacatatacacatattacatataatacataatgtttgtatatactacacatgtatttatatactatgtaatataaaattgtcatatatattgcatataatgtgtatatatataatatacattcatgtatatctttatagggagagagatataaatataaaccattacactagtttacattggctgtaattcagattctttttatttaattaaacatttttaaataatttccttgtgccaataagttttcttcaaaaacatgctatagatgagttataattccttcacttctccccttttaattgtttctgattttttcactagtataaaaatgcccaaggagaaaattcatgcacatattaaactgttagggtgctataaggttactattctcttattgccataaaagtatttttccctgttttgtttgcctttaatttattcggggttccttttgaggtatggaaattttgcattttgttttattccaagagatgaatgcttctccattactttttttcttccatggctggaaaggtgattctcagtcttagatttgtgtcttcttctagtgctcataagggttcttgttttcagttctgtctttgggctaggtggtagttattcagtttcccaagttgctaagctgtgtttccgtcctcatttattgaatgatccttcatctttgaccacaactatttgatgccactaccatactccacagcttctagaatgaaatttttttccatgttagtatctcttagatctgggtcacctttcagactccagcacctaaaggtcttcattggcttggcgtggaggccacttcttcctggaaactttgggatttgcttatgctatcatctggggacactatggacctgagaccacttcaggtttccagtctgaagttcctttggacttcacactgcaacactgtaggcattggctctgattccagttctcagggggagacgtattttcttccctccacccagtgcaaaggttaagatgcaagcgcatttccttgtgatctctttctgcgcggtgcttgtctttcttaaggacacttagaccaagaatatagcccttgtcatagtagttctattaaattccaccttgggggtttttcctctgttattggtacataggataatactgggtcataccatcaataatgtaacttatattcaacaaaatataatatattacatataaaataaagtatatcctaagttcagtttctggatcatctagtatatttgtttttcctatttcttgttaattcactagtatgacagtgttttgagatttttaactttaatgtttcttttaatatctggtaggacaatttcttcctaattactgattctttctaaaatgttccaggctatttctttcatttgagattaatattagaattaatgtttcaagttctcacacatcactcacatcagtaaatgaataatttttttaaaactctgctgaaatttttataggatcttcattaaacctacaaataagtatgggactaattgataagtttacaatattaaaagtcaatatattttctaatcaaaactatttgatcatcttaaagaccttttatatcttttctatcattaaaattttataattctaattttttaatatttctggttaatgacattctttcccagttattatatattctaatgttactgagaatggaattctgtttttcttaaatttctgtttgattatttttcacatacgagacagttaatggtttttgtatttgattttgtaactacctttctaaacttgcttaatcattttcaaatatattttcataattttaagataccatcaacttatattgatcaacattttaaatactttaggaaaatcagagaaacattgctacattaaatacatgcactgattgtacaatgcattctgatgttttaaaaattcagctccttagaatgaagatgtgattttataagcagaacaaccatcttatagatatataatgttaataccattctgtcctcctagtttctcctcttattcctcttatttctacatgctatcattgctgatattatttttgattttaatgagaaggcctctagtgcagtggtttttaattaccaaatttttctttagtatgggggaggtcagaggccttttgaaaatctgatgaaagatgttcattccatcctccagataaagcaaatgtgcactcacaatctgacttcctgagccttcaaaattctctcaaccgtctctatataggcttccaccaatcgccaaagtccatgaaacctggttcaggactcctctatggtattacctcttagacgaatgttaaatgttaacatcgattacatttgcttggttaggacatcctctttattcatcctctttatttctttttttttctacataaagttagtaattagtgttggattcttttcaataccattcaggtatcgcagtaggttgtatcattcctcccatttcttcagccttctctgtacccatgatttacagtgaaaccttacagtttcttctgtgagaggaagagtggatttttctgccctgctgttattgggaacagatatgtgacttgcttaaatggtccaaattgcaggttgaagccaggctgagatgaatccagcttagatcagctgacctccagctgacccacagacatggacagtatacatttttgttgtttaaaacatctgtattattcagggttctccagaaaagcagaactgataggagatagatagatagatagatagatagatagatagatagatagatgatagatagataatagatagatagatagatagatggatagatgacagatgatagatggatagattatagatagacagatgatagatggatagataatagatagatacatagagagatagagagagacagacagatgatagactagatagatagacagatgatggatatataatctatacatagataatagatagatagatagatagatagatagatagatagatagatagatagactgaccaatgagaagggggaattggttcatgcaattatggaggccaagaagttcttttacaggttatctccaagttggagaatcagggaagctggtagcatggctcagttcaagtcctaaagcctgagaacctgggagttgatggtgcacatcctacagtctaaaagcaggagagcctggaggtctgatgcccaagagcaggagaagataggtgtctaaactccagaagagagagagggcaaatttgctgtttctttttgcttgatcaggtcttcagctgattgatggagtctaccctaactgagtgagagtggatcttccttactcagtccactgattcaaatgccaatctattccagaaacaccttcacggatatacccagaagtaatggtctaccagctatttgggtatcccttaacccagtcaaatgggcacctaaaattagccatcacagccactgagtctggggactgttttttttaaaccaacttttgcagctaaccaatacaggtatctatttatttaacagtgtagtatcattccctcgccacataacagactgtcatcatctcagtgactcagaacagcacatgttttccatgggtcaggtgtccagcacggcttagctagaccctttgctcagagtctcataaggctgcaatcaaggtaggagctgggctgtgtttctatctggacttttgagttgggaaataatacactgctaagctgaatcaggttgttggcagaactcattcccttatggctgttttgccaaagtcttgttgttgttgttgttgttgtttgtttgtttgttttgtaagccgtagaccaagaaccagtctcagatcctagaagttgccctcaggtccttgccatatggcctcctctgtaaagccacatctcacaacaaggcagcctactttttcaaagccagagagagagagagcatgcttacctctgttgaagactctctgccagttaggacctcctgattaggtcaagataatctcttgatttattcaaactccactgattaggagctgtaattacatctgcaaaaccctttcatctttgccaaagattctattgattagaagaaagttacactttccaaccatagtcaaaaaacagggattatataatttcattgggggtcatcttagaattctgcctaccacaatcttgtatttaatatgcttaattatattaatatgttaatgtaatatttgcatgttaaatcactttgcattcctagaacaaattatgtttggttataatttataattcctttaaagtcctgctagtttttttccatgggtaatttcatttgtacttttgttctcctattcaaataagagattgatctggagtttctttgccattctggtgggtttgatagcaaaaagtgaaactaacttcataaaacacatttggaagtctactgtatctgtcagtgttcagtcagggaaacagaaccacctcaaatatcctgacaataagaatgacttgtagctgccttcttgtctttggtttcacagggggtgtgttagggaggtatttttggtgttgaaactttgggatgtaatctagtgggtagtgctcaggtgtattggtcagctaataggctcttgctcagtcatgtggctccactatatttcctcatagttgaagccatgctccctctcaatgctctgaaagtgtgggctcctctcccacttcagtgctggctgtagatagtggcatgacactcctgggctgcccacttcagctctggggtgatctcagggtttatggttcttctccaccttggaggcagcaaaggaagggatcttaatagtggttgtgaccaagggtctttgcgtgtctcctgaggacttcaccccagagagatgcaggtaagcgattgctcagtgcaatcatcccggataatcattagagaaatgcaaatcaaaaccacaatgagataccatctcacgccagtcagaatggatattactaaaaagccaaaaaagtaacagatgctggtgaggatgaggagaaaaagaaatgcttatacactgtcagtggaagtgcaaattagttcaaccattgtggaaagcagtatggtgattcctcaaagagctaaaaacagaactgccattcaacccggaaatcccattactgggtatgtaaccaaaggaatagaaatcattctaccacaaagacacacgcatgtgaatgttctttgcagcactattcacaatagcaaagacaaggaatcaacctaaatgcccatcaatggtagactggataaagaaaatgtggtacatatgcatcatgtaatactatgcagccatacaaagaatgagatcatgtcctttgcagaaaaatggatggagctggaggccattatccttagcaaactaacacaggaactggaaaccaaatactgcatgttctcacttataagtgggagctaaatgatgagaacacatggacaaatagagggaaacaacacccactgggtcttacttgatggtggagagtgggaggaggaagaggatcaggaaaaatagctactgggtactaggcttaatagtgaggggaggaaataatctgtacaacaaacccccatgacacaagtttacctatataacaaacctgcacatgtaccccaaacctaaaataaaagttaaaaaaaaaaagaatgagcgtttacatggacaggaaaagatctagtaatgtaaagggtgaggaggagtggggaaagttggaggatcagggaagcctttgttgacctcttgagcccggctgcctggctggatgagcctgagcttgtggggaaatctgaaaagcacacacacccagtcactgaagtgggaccctgcagggggagctcattgcagtggacccacagtggaaactgttccctctgtaggaaccactgcctctgcagacctacagctaagcacttgggggcagtcttggcggtgctatgggaagatgagctggccatagagcaagagcaaggtgaggccatgctggggcccaacaggcagctcagcatctatctgtcagcgtgtctgcccacaccaacctctgataatgacctctgcctccttcccaccctgggaagctcacatcaattcctccttggtcattctgggaaatatcatttggggccttagacaagaactgtagtgccaagttgacaaggcacaagtcagtcctacctgtcatgttcttatgtctgagatgatccaggcagcatgggaagatatattccttgaaagactgaaagggcttgcctataaagttttggatgctggacaggatcaccaagaggcaagaagtgggaaacacataggaggcagctcacagggcaagcagggagagggaggattccagacaatcataactctccacctgtaccagggagtgctgactggagctgagtgatccccacagaggtggaatcactccttggagcaaaggacaagtaggtccacactcagagagtgcatggaacgggaaaagctgctttccttcaccatttttacagtattaggctttctttgtcaactattaagcttttcctttttgcttggtttgaggttttgactaaaggcaaagaaaattgtctttaatagaaaagttgattgagaggctaaggcaggaagatagcttgaggccaggacttcgagaccagccagggaaacatagcaagaccctttctctaaaaaataataaaataaaataaccaggtatggtggtatgtgcctgtgatcccagctactcaggaagctgtggcaggaggattgcttgaggccaggaggtcaaggctgcagtgagctgtgattgtgctattgaactccagcctaggcaacagagtgagaccatgtctctaaaaaaaaaaaaaaagaaaagaaaagaaaagaaaagatgacctcattgactttaattgccattttgtttttgtttcagtcagtttattaagtaatatgccactctttcactgggttctttgtatcatgtcttatgctctctgaattatcttttcttcaaatgtttttgctttaattattttaatttacacaacagacaacaattctagcagtagttttctttaaatttagagaaacaaaggtttaagtggtattaactgcttcaaaaaatagctcttgcttcatagttattttaaattccctgtctgataataccaacatctttgccatttctgaatctatttctaacacttgttttatctcttcagactgtgttttatctttctttttagtgggacttgtgatgttttgttgaaagtcagatatgtatggggcaatagaaactgtggtaaatcagcctttaatgtggggatttatgttaatctgagtaggagttgggctgtgtttaatgtttgctgcagctgtaaataacagaagcttccagttcctctagtgtgcttgttttgatctcacctcttgactttggacttccctatggactccacctcagagagtctgcaacatgcaacattttccgttgttatccagtgttacgataaagtgtgatggtaacatgttgtggcaggggaccattctataatctgatcaaatctcagtattttggtggccttgcttctcggggttgtgacctttgcaagtgttgctccacttctagaatgaataaaacagtggtacagttttcccctccaccccctactccctttcctggcttcagtattcccaaaccatttccttgaagcccagatcccagatcctggctgacagtgttccaacctctacccttttttaggtaccataggaaggctggaggggcctgaagtggcagaccctttctctgcctgggatcaagcttcagaatggtgctctggatacatccttttccctggagagaaactcttcgaactggagaaggctctaggtgtatgtcataatgattagtcctggtaagagccatgaggaaatctcaccatgagaacttgttggggtttctggaaactcacagagctgtggggttcttcctaagacttcagcccctggagttgctcattctcacaccagtccactttcaacctccagcaaatcaccaaagcagtcatctaatgatcctgccagtttatgcctcctatggcttcagctccaggcaagcaaatttttgttgccatgtctgtccagatacccctgtctttccaggtctcagcgtggctttgccctgccacctcatcaatgggtcaaagaaaagtcctttcttttcagtttgtccaactttctgttcttgttgggacaaaaacgttgacttccaagctcttttcttgttggagctgaaactggaagtcctcattaccctttaagatagacacaaaaaggaatcttatatagattattttgactaataaaatgcagatccaactgcccattgaacatgttgtaatcggtatctctgggttccctgtgtcaatgttaagtacatctttgtaagtgtgttattttttagaatggaaagagatgccaatcagggcctagggggaaacactgaaagctttggcataggccatgcctattacagtgtgaattctgggcaccttctcctttgtctactcttatgcatcatcaagcgagacttcatggcttccttaaaaaaaaagagagagaaagggttattagtgggatcacagaacaaagacactctagttcatgcatctcatgtgcctgggaaagacccagcaagataaagagacacatgcaaagggaaatgtcagaattttaaaataagcaataaatcattaaaaataatagttatttttcagaaacaattatgaaaaacataaacatagaaataaaccaaaacaagaactgagatgcaaaattgcacaatggcctgttgagttaagaagtgaaggtcagggagaccccatgatctcagagcagcctatgtgtagcatgccttggcattcaggtcaggcttccccaagacaagctaggcgtttgcctaacatggcaagactggagagagtataaggaggaaggaagtaacactgattaaacatctgctgtcccacatttctctcactcatccgtttgctcatttgaatgaattattaaggtcatgctacatgccatgtactgttcttggtgctgctgatagacaaattagtgtgacctggtgcattctcttgcgaagcttatcattcagtgtggaagacagacaggtggccaggtaacaacattccagggagatacgtgctaaaggagaagtctgcagatattttcttggaatgcccttggaggagtctgagcctgccagggttggggcaggggatgccaggcagaggattccaggcatagcatcctataccaggcacatgagatgcaagggaagagagtgagcatggggaccaagagtgaagagtaaaccaggcaagggaagggcctgtgtgaagctccaaggcccagggtgcaggggagcatgacttacttgagaattgttgggttcaacatggataccacttaggcagctgctggtaggtcaggataatgccttcatccccggacaatgggagctatgagaggtttcagcaggacagcctcatggtcaggtttatgcttcaaggagaccatagtgacaattatatatgaaatggattgggtatataagactggtagcacagagatcagttgacaaccccaggcagaagtgagagaggctcaaaataaggattagtagtggagaaggaaagaaattaaagggttgaatacatatcgagaaggtaaaatggcagcacttaatggccaatttgattggggacatgggggaaaggagctcaagtgcatgacccaggtccagattgtaaggaatggagtgatgggtggttctatgtatgaggagcaaggaggaactttgtatgaagagcaaggcatttttgaggggatagggaagatgatgactacagttttgagtgtgttgatgaggcttccagttggatgtatccaaatttggaattgaggagagatctaaacttggaagctgtcataacctagatgaagggatttgaagcagaccctgtcattgccccaccaatactccctggcccacccagaagttgctcacatgtggctgccattcagacctgtggctttctgtgtctctctgcctgagacattctctggttttggcactgcctggcaccagctagtaagagacagaacgttctgggaggtgacccctcaggaacaaccttcagttgttgagggagggacactgttagataaatacccattttctggccccttggggagcccatctgtgtgcattccacgccattgttcctcaaagctgagcccaaccatttcccctggaaagactgctaaaactcagattcccaggccttctccggagactctgagttattaggcctggttgggaggggaataagatttgcatttctatgcacatgaaaaccacaatgagatatcctctcaccctagtgagaatggctattattaaaaagacaaaaaataacagatgctggtaagaatgtagagaaaagagaactcttatacactgttggtgggaatgcaaattagtacagccactatggaaaacagtatggagatttctcaaaaaacttaaaatagaactaccattcaattcagcaatcctactactgggtatttatccaaaggcaaataaatctgtgtatcagagagatatctgcactcacatgtttagcctagcactattcacaatagcgaagacatcgaatcaacctaagtgtccatcaatggaccaatggataaagaaaatgtggtatacatacacaatagaatacttttcaggcaaagaaataaaaacaaaagaatgaagtcttgttatttgcagcaacatggatggaactggaggtcattacattaagtgaaataagccaggtacagaaagataaataccacatgctctcactcatatgtaagaggtaaagaaatttatctcatagagatagagaataaaatgatagataccagaggctggttgggtgtgagggtgggaggaggaaatgaagagatgttggtaaatggatactaacatatggctggatagaagaaaaaagtgctaactatcaatgctaggctagggtgacagtccttagcaaaaatatattgtttatttcaacatagccagaggagaggacttgaaatgttcccaacacatagctactgaaggtgatggataccccaaataccattatttgatctttacacattacatgcatgtaacaaatactcacatgtatcccataaacatgtaaaatattatgtatcaagaaaaggattttttaaaaaatttgcatttctaacaacctctattttgcgatatctctcagcacaaacccaaggggtccttcccagtttgcaggagaggtaacccctgtttaacactcacttcattgactttctgtctttcctatctcccctccctcttatctggcttcttggcatcacactccaaatgaactataggcacccaaatccttgtctgaggtctgctttgggcaaatcctaaatatgatagccactgaggcccctgtcttatgtataataaggggatgcttggggaaactatctcagaattgtcatccaagttgggacacatgggcatgcatgagggacactcaaggtaacacggcagcttggggattgtgcctgattcctgttcccctcttagaaatatttctatcacagcactattcacagtggcaaagatatggaatcaacctaagtgttcatcaatggatgaacggataaaagaaaaggtggtggatatacacaatggagtagtatgcagccataaaaaagaatgacatcttgtcatttgcagtaacatgatggcactggaaataggatattcacagagagagggacagacatttcaacaggcttagaagcctggcttactgactgatatggtttagcagtgtccccactcaaatctcatctcgaattgtagcttccataattcccatgtgttgtgggagatacctggtgggagataattgaatcacgggggtgggtctttcctatgctattctcatgacagtgaataagcctcactagatctgatggttttataaacgggagttcccctgcatatgctctcttgcctgccaccatgtaagatgtgcctttgctcctccttcaccttccaccatgattgtgagacctccccagccatgtggaatggtgagtccattaaacctctttcttttataaattacccagtcttgggtatgtctttattagcagcatgagaatgaactaatacactgatccatgatattaaggtctgtgggaggaagtctcaacaaccatgtggagatggggcccagttctgtctccattcactgtacttcctgctcagtaaggaagcattagttattgttgttgttgtgtagcttttgagacattaataaagctcagttattgttattgttattgttgttgctgttgctgcagcaataatattctgttattatagaagcttcagggagtcagtgttagttattatcattgtcattgttgacatcattctattaggccctcaaggagtctactccttgaggagtggtgcaaaattctatacctttttttgaggagaaggtctacaacttttatcagatttttcaagaaacctcctaagagataacctttgatttagagggtagtttaagtccatgagaatcagtgagattgaatagagaaaaacagccagacacagtggctcatgcctgagatcccagccctttgggaggtggaagtgggaggattgcttgagcccaggagttcaagaccagcctgggcaacacagggagactcatcttaagaagactcacctctacaaataatactttttaaaacattgttaggccaggtgcagtggctcatgcttgtaatcccagcactttgggaggctgaggagggcagatcacgaggtcaggagatagagaccattctggctaacacagtgaaaccccatctccactaaaaatacaaaaaattagccaggtgtggtggcaagtgcctgtagtcccagctactcgggaggctgcggcaggagaatggtgtggacccgggaggtcgaagttgcagtgaggtgagatcacaccactgcactccagcctgggtgacagagcgaggctccatctcaaaacaaacaaacaaacaaacaaaaaactgttagtcaggtgtgagttggggtggcacgcacctctgatcctggctacttgggagactaaggcaggagattctcttgaacctggcctttgaggctgtagtgagccatgattgtgcccctgtactccagcgttggtgacaaagggagacttggtcacacacacacacacaaaaaaaaaaaaaaaagagagagagaggaacagttctgtgtgcagattgctaagtgagcagggtcaagttcacagtctggaggcagcaacacacaatggtgagcaaggagaggtggtggtgtggatggcagagggaggcatgttcataaaagaagaaaactgccaacggtggcgagctctctagagaaacaggcaaggatgaaagcagaccatgctcaaggcatttcaggaggatggcgaagtcaggaggcatcccaggatgacccaggcactgtagggcgtgactgagaagaaagacagccccaacagaagatgccaacaactctttcagcgagagggtttgaggagactctgcagctaaaggagggaggtgggatggtggggagggggaatagttttcaaatgatggaaataaaaacaacagtggaccagaatgttcacaaaagacataacatctcttcatctctgctttaaatatggaaaatgagtctcaagggtgtaaaaaaaaaatgttcagtttcacttaacccattgatatggtttgactgtgtccccacccaaatctcatattgaactgtagctctcataattcccatgtgttgtgtgggagggacctagtgggggataattgaataatgggggcagtttcccccatactgttttcgtggtagtgaataaacctcatgaaatctcattgtttaataaggggtctccccctttcacttcgttctcacttctctcttccctgccaccatgtaagacatgacttccaccttctgccatgattgagacctctgtagtcaagtggaattgtgaacccattaaacctctttttctttataaattacccagtctcaggtatgtctttatcagcagcatgaaaacggactcatacacccactaaccacagaactggaagctggcttcggtctgtctctctttggagtaagctgtccatggcataatatttcttaatagtgtttgtagtcacaaatatccatctttccatggctaccatgctagatcaaattcttccatagggttccttgccaccgtttcattacagctctttctcaagatcacttttcagggtgcaaggaccccaggaaggcgtcattgtaatcaaaatgtgtggatgggtctggcatcagatgtctccctctgacctaaggcaggaagctgaaggcactgggcacctggggtaaagcagaggaagggcccagaaagtggactagacagacagccaccaaagatgcagtgccactggagttttacctcaatgggacttgcagtaatgacacccacgtcttgtttccttcttttgtcgtttgatgtcttggtgaagttgggtcagtgctatgctagtagccttctccagaggtcaggggacctgccaggacaggaatagggagtgagttctaggtccaggcaaagccatacagtgggctgggctgtgacctgcacgtccatctgtggctcacctagggagagcagctgtggttcatgcgtgaatgggaatattgcagtcctcacatcttgcagaagatgctgcagaagtccatcctctgcttgttctccatgctgattcgggctagaaagagcttggtcaccaagacatgggaagatcatgcaagagcgtaaaacagaaggatcacaaggctacaagcaaaaacaaagccaaaatttgaccacagcagaaaatcagctgctaaacgctaagaaaggctagatcctaatgtgtgctcattgtctctggaagaatatatctcttccctatttgagaaccccctgcctccctgactctctcctacaattagggaagaagtgatggggaggacacagacgcaagactgtaaactgagtaaatccctgatgccacagagacaaggtggaagggaggcactgtgatggcaaggtgacttagcaagcccagaaggcaccaggccggctttatccagcaacaatcaacctggtatctgccacaaaaaagtaggaaagaaaatcgggacttgatccaaataaatctatcaagtatcaagtttggcatgaataaaaatgcacctagtgtatcattgacttttgtatatctgaactccaaacctaaccagctggaataccctattttaagtagcatcccattcgaccttccaaaaggaaggcaagttttagcaggttggaagtcagtgccttaaacagtatcttcttctctggatgcaaatgagagaagtactgatctactccatggaagaaaaaaaaatcagaactaagccccaaaagccagaactaagccccaaaagcaaaaaaaaaaaaaaaaaaaaaaaaagaaagtaaaaaaaagaaaaatcagtgtgatggtttcaccatctaaagagttattggcaagttagtggtccatgtcctgtgaccacatcggttctgctttacaaagaatgcgtcaatcctacagtcttcacagctaggaagtaccgggtggttatagaccatcagagcgcacatgagcttgaagagtggacttggtttctgtccaggttttagagctcataatgaatgatggttgccaatatgggctcagacagacctgagtcagatttctactctggggcttggaggcgctcagtaacttgctcggtaccctcccctcccaccacaggactgtgattctgccccggcttgcaggacttggttacagacagatgagataacagctgcagacctcttggctccgtgtctcttcccttgtaggtgctcagtagctaagtagatacccgttctattttcctctaaattttccttacaatttaatcattagcacaggtctctccaaagagcaatttatgttaaagaataattttaaggcattcaatttgattttaatagtcatagctaggctgtgtctagtttgtgattttcaaacaaaaccaaacagaaacacaccgtttaaaatgagttaagctgaaatgagcccttgagtgaagctaagttggatacattttgtatgtcatagaaatgatgggagggaaccaagctgaggtatgttagggatgaggttagagactagaaaagaaaggggagtgaagcaaggggttctggtttgggagacaagaaggctgttttcaaggtagccaaaaggcataaggaaataaggccatctccctgctgtgccctgggccatcttcctctgcccatcagccctgcttgggccaggtgggcaggatgagggtccttcactcatctgtggagccactgcagtccctccagccgagctcttctaccccacccagcttctcttaaatctacctcttgagaccaaaggaaaacatgattttcatccagatgaaagtggtgtgtgtatgtgtttttaactgttgctgaatttcacatcagaaattagaagccctaaaaattaattttaaccaaacatactcactttattctttctcgctacattcatcttttctgtctaatactgctatcacttcctgagaacaagaggagaaatattagatccttcagttttaaaaagtaaaaagccatggacagaagcatgcccttctcctttggttcttagcattctggaacgcacctgtgttaaaatatgaagaaataaaacaaatataaattatgcattttccaacttaatttaaaatgcattatgctttgctttgttctctggaattagtcttattaaggggacagatctgtatggattaattttgagtcagtttattcacttctttgtaattcagtggcaagaatttttgtccccaggcatcaaattaatttttttttttttactgtaagtaaaacatacaaaatgtagacctctttgtgttatttctttgtttacctggcatgcaacatattctcatattatgcttccaccaaatctgaaatcttctccctttaaacaacaaaactttacccacaatttttaaagcaatgtaacctttgtcacaatattggagttgaacacaataatagcattattctctggttgtattcatttctattagagatcttcatggcctccctctaacccaaactcaaggagaccagcccccaagcccctgcctccccaataattttgtcaacatgtgaactgatattttatggctatttaaaatgggtactaaatcatcattcttaagtattgttttagtacagtaattctttgttctgcttcgacattttaaatctttatatttttcctccctacacggagcaagaaaatcgtctgcattcttaattagtcttctttaaacaaaatatcctttcatatgcactaataaagactaaggagccttaccctcttgtttaaataactgcttgctgtagtataaaattgtaagagaaacgatgcagatcaagttgcgggcttgaagtggggaagaggaacaagccgtgccataataagcagattttaatgatttactataaatcagcatttttgccctgtcagtgagattgaagaggcagacagctcctcacatgtctgccgagcaaatgccttcctgatgaatcatgtgcactgaatcactgatcacaacattcaaacggcacatccaaataatgagggaaacatatacacaggctcccgatggctgctccaaggcagcaggaatatatgtttttccgttgtgtggtggttaaacccctcgcattgatcctccgaggactgcatggagggtaatagaagtgtatattacccggttaaccgctggtgcccgaaacacaggctgatctccataaatgctctccccaaccccctagactttcgatgaggatctaatctggtcttgaggagaagggaggaaagcagaaaaaataaaaataaaagacaggctgtaataatgaacttgaacgtaaagaatctggctgcaaaacccaacagaaattggagctaatttctggggactggtcttccgatatccccctcccaagcctctgcccctgctgtttgcttcctctgctagtgcctaataatccccagtggtagtgcttccggtcggcaggatcatctctggggagaggagtgccactcttcttgttggaaggacccatttggaaactgagtatggaggaccccccgacaggacagtggtccagagagccaggcccctagagcagactctgaggccatccctgacctggacttggagatgttcaggaagcctttccagcagaccagaggctttccctgatggcagccttcagggcctcactcctctcgaccgccgcagcccaacatcggcagctctctctggtgctgcttgcttcttgttgtctttgtaacactcatcctcatggactgtggcttcctcagttgcaaaatcattgttttaacttttttggaaacccttaaaataacttgcacatagtacaggcttttccatcatacacctacctccatgagtaatgaatgaatgaatgacagccacagaggccgggtattggccggccacactgagccggctctctaggacacctcactctccgagaaaacgaggacgtccttgagcctaagacaatcaatttctctttgccaaatcctaacctcactccctctggcatccaaagccctgctttggggccagctgggaatctacgagccctggtcccacccgtggacttacctggctgcctgactgcctggctgctgtggggaagatctccaagggaagtcccagctcaaactggagaggaaaagagggaggcctccaacaccagggcatttcacactgcattctcgtacgtaccccacattacatcccagtggtgctcccggaacacagatggggccccacagttccacactttctgcctctggctggaatgcccactcctcccctatttaaatatacgtattgtcaaaaatagagctccccttcctccctgaagccctgtctcatcttgtgcaatggaaataatctctcccttctctaagcccgattatgcttcagatatttcctttgttcattcattcattcaatcaccctgcctcacaccaggagatgcctggtctcttctggtaatggtgaaaagaagagtgccaccctacggggtggcggcggctgcaccgtccattcttcagtgtgcattgagcattcgctgtctgctaggcactgttctgggcccggtggtgacctagttggggctggacgggtcctttccaggaggtcaccaatccgtgctatctgtgtcctcaatcagaatcctgcacttaaaagggcctttccctggtttactgctctaatgtcaccatcacattcgtaacattcatgaaattcgtaacaatttttgaacaagagggcctgcattttcattttgtgaaatactatagcagtcctggcttttattttgaaggacttgaattcagggtgggggatgggagggagatgaaaataaacaagtaaacgaatgaacaagacatttcagatgtctctgtgtgatgggatggagagttgaaggagggctacttcacatggggaaattaaggcaggctggtgtgaggaggacttctgagcggagttgcatgtgatgggaagacacaaacataacaagcatgagataaaccagttaaccccatgaatgaaatgagccgattaaccccatgggttgcttcagtgacggctcaaccttttattctgttctggatgcttggactggtgggtgccttccttctcccaccctagagggaaatttttgggacgtacaggcccctgtggccttctcccgtagccagagacaggcagaccattaatgccaccaggaacaaggaggaacaccctggtgtgtgcactctggaaccctccagaagtccctggaaccctctggaacagaaacctcaccttcctcctcctcccctggcagcctcagcccctaggccccctgggccttctcggttcctctgtccacctgactttgcccaggaatctatcttccataggagatgcggggtcctacagacagccttgagaaactcatgcccaggaggtgctctgtctctgggcctaaggtttagggaaatggtgcagaccagccagtgcttgtgaatttcctcttctccttgggtctctagcccctggccccgctgtggtgtctcagagcaccctgatgggtttgcatcacagcctttcgcagcagccttccttggccaggtaagttaagtatgaattcttttacacaggactcatgattcctttaggtctctgtggagaacgggagtgaggggaccagggccagagctctgccctcccacaatggcctctccctgtcctgttcaggaacctctcctgccatttgagcctcaggccagctgtctcgtggagaagacagagaaccaaaccacccattatcccacctggccaggaggacttgagatgacagattagtgcagcaccaagcacagtggctggcacaagagacccttgtcacctcctccaggctgtcttccttcaataacaggctccgttgtcatgcttgggtactgccacagcagtcactgattctctactgtggcatgctcctgatgaaattcaacagttgggacaaatgggctagaaagaaacctctctgagggcagaggccttaggtgccacaatgcttacctggacctgatacccagcaggtgtgcagggaaaggtatgcagaagagaaggaaggggatggcatggcatgcacagcggcagcacacaggctgtgtgtgggcagtgcccaggaaggaggtgcgtcaatacaacaagggttgacaccaagtgcagtgcagttgaaagccacaatgtaattatccacccaggaaaagagggtcccctcccatgggactgccatccatgtgaagagaaggaaaataaactcattcaaggtcaatttaaaggttaaatggaggtcaaccggggggaactgagaccatccctgtcaatgggagcagtcttggccacttacttaggactttaacctttggctttaacattcatctgaaaaaaaaaaaaaaagtgaagcagataagtgggtattagtagacataccattttagccatcttagaaaataaaaaataagagtgatcgtggatccagtggcagttactttagaaagatagtaatgtgtaattcccagtttctcagactgtaacttctgcacttaccactaatttctccactgctccaattgcagtgtatacatttagtttacaatttatcatcaccgtttgtgtatattacgccagcagcataatccatcctcatgaagctaatgctcagcattaggaaaatggactccgtatggagcctgccagactctggcctcaacacagaccgagttgcaggttcctgggcccccactccccccaccccagagtatatgtggcgttatgttttgtgcactctctccaaatggcacggtctgatttctgcaagttgctggtgtccattgtctgtggatgtaaaaatcaatgacctacatacgattttgattttgcactgggaattgagagagagagagaaagaaacattgagagagagagagagagagagagaaatgagatgagacgcaaacggaaaataatgaaacagtcatgttaagaaatatattagcatgttggactcaaaaaatatatttccaagaggatatcctttttttttcttccaacaggaacatatttaatttcatggtcatttgattaaaacagttaattgtattaatgtgttattgagctgaaagtgctggtcattccgggatggacgctcactcgggcgcagagaacaaaacctcgtaattccagggctctttgggagctggtggaactaggacctgctattgaaacctctcagtggatattcaatccttgtttttattttcttaaaagagagagagagaaaaaaaagcctcaaactgctgatttctgcagaaaaatctgcaaatgaactgttctattagcacaaacataccaaagtctttagaacccctctcttcaaaagcataattaggtatttatttcagacatactaacatctttgcagtagctaataagatgcagcccatttgaatattaatataataaatgattaaattaaacagcaagattcagactcagaaatagcctttataggtcccagggggtcactaaaactgtttccatttcttcctacagttaacatagtgcaagggacaggaatgcatagagcaatatttgtcttatgaaatgcggagttttatatggtgctattcagttttattactccacagtttgaatctggggcccagagtgaagtcaccatgctgtggtctgacagcccctcttcctgtctcactgcttgctggcattccagagacgctccactgcttggcaaagagtcctctctgatagtctccataccaataggtactcatggagctgggcacaaggtaaactcacaatatgattaaaggaaacaaaggcaaaaccccaaaaccaactgacgctgcataccaaactgcccagggtttattttgtgtgtctacgtgggtgtgtttctcgattccactgagctcagtgtgtgtgtgtgtgtgtgtgtgtcggggggtgggtagcggggcaggctgaaaggccacacccaaagctggggtgtgggctgaagccagatgcaccaggatgtgggcaggctcttcatctctcaactaggagggacccccgcccacccacttcacgcgcacaaaaaagaataggcaaagtccacaattataattggcgattattccaataaaggtataaaggtgtttccctttttaaattagttcatgaaaactgcacagtctccaaatcccatgaacctgagatgtgttaataaacatctggccatggtttttgcttaattagcattctctagtttggacggaagtctgtttatataaaacaaaacacacacacacacacatacacagattctgttttgtaagccacagcccctcagaaatccaaaacgagcctcccctaatgatcggagagagatttgggtctttccatactcctatttgtcaactgagcagcagaagagaaaagatacttggatctgcatgtctaattttattatgcaagtctcagatccaatatctaataacttgatatagtcatgctgtttgaaaatattcacatttttggaatagaagatattgaagcttgcaggtcagcttgcattaaatagaaaacaacacaaaccaacctcaagcatgtccacggtccacattattattatccacagccaaaaatctccccgccctatctctctaaggagcagcgtcggcagggaggtaatggataaaccataacccggcttgcaaggctttactgtctaaattagataaaagaaaagtaggaagaaaactcaaagataagtggtacaaagtaaatcaaaacaaatcatcttaccaaactttattcacatctgataccatttttagaaattaaggtcagttttgtggaactaataggaagttatacctatatatcttggacaccatgacaatgccggggtggaagatttatacaccatggttgcagatgcagaagaaagatatgagagatcaaatggaagtgcatgataacaaatgaaaaatggtccccacagcccataaattaattgagaaaagaaggttgtcattatttgaacatgctttaaaataaggtatggagtccagatggctgaggatagataggcccacaaagtttgagtaattgatgacttaaaaataaaacaagatcttaaagaaatgaatcacgttgggcaagttagaggaggaatattataagagaaaagatgagatttaaaaaaagcacacaaagcaaaaatgaaccccacatctctggaaccattaaagcccaatgaaagcataaaagaaaaagtgagttcagggggattcaaaaatgggggagagggcaagaaggtgggcaggtcagaggcaaaactctaatatggctatgtttcagatgctatttcattaacctattcagctttgttttggcttttctgttgcaaacatatgccttttcctttttttttttttaatggtatctaaatagggctaccctaaggtgggccaccaaggttgcaaataatagttttctgctgctgcctcttaagctaatcccccactagaaaattcaaaaacaatttgcctctgggatacctctgttgcagggtgtggggtagctggcagcttgagaattttcttggggagttggggtttgccaaaagcgcaaactcaattgattttccacagccagagtagaccagaaccttccccaaggagaggatatcatcacctagataagcccatctcctttcctgccccctgccaatgggaagaaggcgcttgtcttcagtaccttctcctggaaatggtatttctgctgtatccagatgcaaaatgagttctaaaggaacagcaaatgctccctccctccttccttccctttttcctttcttcctttcttctttcctttctccctccttcccttccttctttgccccttccctctcttcttccttccttcatctcttcctccctctctcctttttccttcttctctttctccctccttccttcctccctcctttctccactccgtccttcctttcccacttcttcctcactctctccttccttcctccctcccttcttcccttccttcctgccttccctctttttttcctggctttttttctgtttctttctttttcttcttcttttttccccagaatctcttcttttttcttttttgacacttctttctccatctttctaatcactacttgtgccaccatctgtaatttcccccatatccctgaaatacaggaaatggaagcagcggtgcagcgtattccatatttatgacttctcagtacattagagcatccactggcgctggagagcccccgtctgagtgcagctcggtggaaatgctctctgtgcagccaaaagaggccggctggggcaggggaagcctcggaagtatgctaatcatgcctctcaaaggcttcccatgagggctctacttggtccttgttttgaaaatgtatttttccctctgcttctctcctttacacgcatatatatttttgccctcaaagccagatatttgctgttcacactaagagagtattatgaatattctgaatgcaaagatagctctgggataggacatcaggcacggaggtcggcatgggtgtacacagcccctttatttacccagtgaggaggcaggctgcattatcacaatgctctcctccacatcataccccgatccctcacattaaactccttggcaactgattactgatgacaaaaaatatatatacagctgtacaattccactggctgctaggaatgtacaaccacagactacctttccatgctaaggaacatgcaagtgtgtgatgcatgtgtgtgcacatgtgtgcacatgaatttgtgtgagtgtgaatgtgcatgcatgtgtgtgcatatgtgtttgtgtgagtgtgagtgtgtgtgtgttggagcaaaatacttgctattgtggcagtataaaggcaaagtttaaaaagtgtctcatcacagttcactctcgtgttattaaggtgcattaatctccaaagtgagacacacacaggataaaccaaaatatgaccctaagtgctgaaggcaagccaacggacttggaaataatctgaagacagaaatatataggcagcaaacatttcaagagaaggagacttgccaggaggattgatttgaatactctgcctggagatttattttgccttattgtcacaaaaggcaatgccctgcccccagccacccgccccccgcttcaggcagtgaaggagatggcataaaaacctctttgaccgcgtggcgatggctatgtcttagtagaggctaaaaatggatgagaagtatcggagaaatgaacttctgcggttttcaaaaaacggttcagaatagatgagccaactcctttacatgttcaaaagaaagagggaacaattttgtgaaatgctaaggcagtgcaaagtgaatgttaaatagtttttatccaccaaaaaaaaaaatagacttattcaaatgcatgtcttgcttgtctttaactaaagtgaaatttcttaaatccagctgtagtcttatgggtggtgggaggtggcgggggtgggggacagcagaagcacagaacgtcttccttgaactgaacatcatgtcattttaaaagcagaggcacacacgctattgatttttttttaatacaaatttggcagatttcacatgatccattacatttctcaggacggttaagatgcagcttgcatgatttattcagaataaggtccatttttagctatatttaagtctcctatttgttatttaacatgtgtttaatgttttctgcccctgctgtgcacagctgcaagctgctattttttggcaatttttgtgactgggaagtgatttgtgtctttgcatctcacctttctattctgtgggcctgctgttttgattttttcctaaactttgaaaaataagttgctctgtgtcgcgacctctgcttcactttgctgggcaaacaggaaagcttaaagagtacaaccaaccatgacagacctcttacagagtttttagaacaacatcactgggaactgaaatttcaggaaatttatattttaaaaaatgccaagttttcccatcccagcccctcagaacggattgaagctagcaatttggaagaacgtccgtcctccagtgagaatgtctgtggtgatttaagttgatgctgacatgattctgcagggcttagccaggtaggaaccaatgtggtacctatcacctatcgaggggaaaaggcagctcccccccatcccccacaactgttttagaaaacatactccaggattctggaggcacgtgcctcagcaacatgcttactgtaactgtctctctgaatccattcttccctgaaggagggtatgccactcagggctgtctgtccagtgccaggtcaaagatgcccctgaacccttctcttcccctgcacacctgcccagaccaacacaggaagtcagcaacagacacacattgcaaagaacagagcatcaggcttggacaaagagtagtccaaccagcctagtttggacctatcatatataagtaaaaagtctgtaagtgtttacctgattccatcagacacgacgatggcactgagtggcccggtgatttatttttccaaagcccaaacgatcctgcttaatattgcttgatatgtgctaaccttccctttgcagggcctgcaattgaaagccatgcagcagtggtttaatcctggcctcttacttatctaaaacacactctctgactgtgctgtgaaaattgaatcttttccccacaatcttactgacatgaaaaatatataatacagtaaatgattaatgcagttataaactatacctgagataagatttaagtattcatatttctatcatgttaatacaacacgataaacccatgaagcaaacttgaccggggcatttgttattctgtccagtgttcaattattctttgtccaaatacaatttaggggcttgctgtaatgcagtcacttggtgaacacattatgtgcttctgggagataataagctacatcgatggtcagccgaggagatctgctccacagagacccctaccaaacaccagggaatatgaagacagatcgcatgggccctgggcccggggacaggccccctgaaaagatcatttgcaccagtatgccagcctcgtttcagccacccttcctcccttttataagagagtctcccgttaaaggcaaacttatttgccgtaatcaaaaggaagcttaacaataagtgaaactgcttaaaagctgccttcgcctaacgctgaatatggtttttttatctgtgactgtagagaagccatttctttgttggctctaaatggcccccattccttcgttgtgcaaattgctcacacgcgccaatgtgccatttaccacccacctcattatttttatacttccgatgatgtcgattttgattttcaaatgccagccatttatagctcattctaaaacacacacacaaaaattaagtgattcacaatctctgccattagctgggctttgggggcctctaagttgaggacaagcagtatagcacagtggccacacacctgcgtgtggtgtcccagatctgtccctcattagctaagagaccctgaagaagtttcttcacctctgtaagtcttagtttcctgcttaggaaggtagaatcgtgctttctacctcttaggtttgaagggcaatcactaacagtatgtggcatgtaatacatcctcaacaattgttaataatcactgtatggtcattatttcctgggtctcactgcaacaagtgagctgtccgtggacaacaggctcattctcaaagctatctgctcaaagctggacagggacccatggtgccacatcttgctccatggactctagaaattgctgctgctttgagagatgctttctgcccttggtattctgaattcagtgcctgggaggagaagcacttttaaggtccttggggacaggcaaggcagaagacattttgtaggaggctcactcagtaccctgcacaagtggatctcagtgtggatgtgaactctaagatataggggcattggaaatgcaaataggtgtgatacagtgtgtacacaatcttcctgggagtgtctgcacacaggtcctatgatcctctttaatttattttatttctttttattttttgaatttttctctttttagagacagggtcttgctctatcgcccaggttggagtgcactggtgcaatcacagatcactgcagctttgacctccagggctcaagtgatcctcccacctaagcttactgagtacctgggtctacaggtgtacaacaccacacccagctaatttttaaaatttttatagagataggctctcactatgttgcccaggttgatctcgaactcctggctcaaacgatcctccaacctctgcctcccaactttctgggattataggtgtgagccaccatgctaagcctaaatcacttttaattatgacccgtctgtaacaaagccaagtccccaagtactgacagagagctcacctgagtgggccctcaatgttcttcaaaattaataccaggagcatggaaaactcacgtttttttgaatctctctccaaagtccagccctctgtggtgggaaatggggaatccacccctcagatttgccacgcagtagacaagttgtaaggagaaagggacctctgcgtttgtttggggccaggatgagatgggccattggactggctcctggtggccagagagaaacaagaaatcagccagtctcctggtctacggacaggaagagacctcgggagagaagtcaagaaggttatttgatagattgaatgagccctctcggtgctggactgcaattaccttagggtggagattgtgaggtggaggctgtcttcatgcctactctatagaaactgacatattaatgcttcccttgtagagcttcatgaaatcaggtatttccacaactgcctttctagaacaaaacagctttacacacagagccctagatcctgatggatgctctcagtgaatactagcttttgtcagagtgaatttctttctttcaattgcaggatcagaaatatgtactttggaaatattgggaatgacatgcttggcatcacccttgaatgttcagtattaaggagggccctacagggaagggtgcattcaaggcccagagcccagccctcatccagctgctcgctcactgctccttcaggctagcaacctgcatatcgcccttcgtctgggattctcttttcttttcccagacctgggaaggaacatgcctgtgttttcgttctatgagactctgcctattcccataggagggctggccttgatgtgggctgctggcttggacaagagggtcctccatccccccaaatctcccctttctgctcttaggttttgaaacatttttaacaaggaaagatatgtcttgcttcgttggtgagatacttttaaagtgatgttagttttgaaaagggttcattcaccaaaactgaaaggagattttcttctaagactgttcttagcaggagaaagaggaaggctagaaatcccaggaagggtgccatattcccagcatcagtaaatatttgcttaataaatgaataaatgactctgggtgtctggcaaggatggataccacaggtcctgaaaaggaccttcccagaggcatttgtttcctctccagtaatggggagagtgctaggcatggaagaggaattccataaatgtttgctgaactgaactgaagaaaaggagagtctagcatggataagtccactctgctgacttcaaaaattgatgcaggtctcttgatgtcagccccccaaatactttcccatccttcgacacactggctctgccttcatgcagtggccacgatattgtccctgcccctttctggttctgactcttccgacattgtcagccttgctgtcaagatccttctcatgtccattgattcctgtgactctcattgcatcctctcctcagtccctcagttgataacttttaaacctaatatccatatttcccatggtcatcccatggacacaggctgggaccgctccccaaagccatctagaaagacccccttttctcccttctccatcttgacagcaaaccatcaacccaatgttaaggaaaggcacaaccatcagaacattttagcaaataacataggtgtaaaattgttttgtgatccaaccaccctggcttgcccatgactgtcccagtttagcactggaagtcccatgtccctggaaaaccgttggctctagacaaacctggagggttggtctgcctgcccagcaataccacagccagagtctactccaaaaaaatagacatagatgtgtatcaagacttaaccaaggcgcttttgccagagcattattttaaacatgaaaacactgcaaatgggctaaatgtccaacaacaaagcagcagctaataactattatgtctttgccatacagtaagccactctggtgccatgacaaaggacgtgctggaggaaggctgggagatgtggggaatatgaagagggatgtataatattgaagcataaatgatgcagactcaggtgaaggtgcatgtattctacatacaaagagtatacttagcactttgggccctggagccaatccagctaattaaatcatggctttgccctttactagctatgtaatagagggtaaattacttaattcttccatgccttggtttcttcatctgtgaatgtggttaacaacagcacctaccttatcaggcagtagtgaggatttcatgggttcctatacataaagcactgggaacaaagaccagctgatagagtttggatatttgttgctgcctgtattagtattctctcacgccgctctaaagaaatacctgggactgagtaatttataaggaaaaaagggttaaattggctcacggttccgcaggctcgacaggaagcatgatgctggcatctgctcagcttctggggaggtctcaggaaatttacatttatggtggaagggaagaggggagtgagcacttcacatggctggggcaggaggaagagagagaaagggaggaagccctacacacttttagacaaccagatctcacaagaactcatgggtgcaatgacaacactgagggggatggtaataaaccattcatgagaaacccccaccatgcaggtggtggatcacctgaggtcaagagttcgagaccagcctggccatcatggcgaaaccccgtctctactagaaatactaaattagctgggcatggtggcacatgcctctgatcgcagctactcgggaggctgaggcaggagaatctcttgaacctgcgaggcggaggttgcagtgagccaagatcatgccattgcactctagcctagacaaaaagagcaagactccgtctcaaaaaaaaaaaaaaaagaaacccctgccatgatccaatcacctcccactaagccccacctccagcattggggattacaactgaacatgagatttgggcagggacacagatccaaaccatatcactgtccaaatgacagtgctggagttggggcctggtgggaggtatttggattatggaggcggatctctcataaatggctttggccatcctcttgatggtgagtgagctcttactctgagttcacaggtgaacttacacctcccctacacacacactctttctctcactcctgctcttgcatatgagacacctgctcccccttcaccttccaccatgagtaagagcttcctgaggcctcaccagaaactgagcagatgctggcatcatgcttgtacaaactacagaaccatgagccaattaaacatattttctttataaattacccagactcgggtattcctttaaagcaatgcaagaacagcctatcaaactggcacagaataggcactcaacagacagttgctgctgctactggtggtggtggcagtggaggaggaaatggttattgagcctgtgccacatgtcaggctcaaagctaaacccttgttgtgactttcttcatttaatcctcatggagtccccataatccagtttaaggagttgccaaagctcccccactggtaaattgtgagccatgattcaagcacaggcccttaaagtcattactgagaacacccggcagggcactggcgagtaacgtgtgatagtgttgccatcctccatgcccaggctaacttaaccttggacaggagcataactgcttgtcagaatctcatccctgctgacagtcattaactttaaggcagcacagaagagagcatgttaagttaaactcagacctgtgcttgtcaattacaatgcctttagaaagatgctaccatgattcacgatggactcaacatgttcatgtcgacaaggaagactggatgtcacacgctggacaaaggtggtgtaaactgccagattcccagtgataggccaaggaattccaaagttaggagagctccaggtgtcaaactcatgaaggactttctctcaggtattgaacatctatctgcctaaagcctccaactgcctttcaagagaagacccttatcttcaaagaagacatgactgaattaaggggaaaaaggttactcaaaagtttaatcaaataggaaatgcagaccaatacctaatattctttgatgtgcttcaaagataggcagtcaatcatgaaagtgtttgaagaaatcgcaatcaagattaccaatgtgggatttgaagaggcagcagctcccgggaagtggggcatcactgctcatggccaagagtaattggacataaagaacgcatagattcaacttttgataacttcaattgtgatttagaagaacaaatcagaatgaaattgaatggataaatgaacatcttattgcgggctgaaacatttttctgttcaattcattagtgccaccccattcccaaataaagaagctctgatgtttcttatgactaatggtgttgtaatatttaggaaagaaggaaagaagtgatgtgtttgtgtgtgtgtgtgtgtgtgtgtgtgtgtgtgtgtatgatatatattaccatattgtgttacatatttattaattatatattattctattatatatctctcaaaagattataataatgataattatatttgggcagtgagatcatagatgtcttcaaatttttccttgtatccttcgtctgaattttctgcattatcctcactgacaatgcccaatttcagtaataagaaaactcacaccgaagaatgcaaaaatatctgaagccaaacctatgtagtccaaagctgtctgctttctagtttctatgctaagcccaacttgcacattcaaaacaccattcccgttacatgcatgcagtaatgtttcatcaaaattgcatctggagtcatgtccctggacactgggctgtcagggattaagatgggtgcctctaaattctgggggacgggctacctattgagccgtaggtagtgcctgcattttgttacccatggtgacagctgccaatgtgtgagtgaatgtgaaatgtcaagttctttggcaccattcctggaagaatctgtaatttactggcttcctcatgtcactgtctgaagtattgcctgggagacaggctatgacccaccctggatcttggcccagctttctttagggttctctgaaggccactttcccatgagggtcctttggtgggagcccttcccattcattttcctcttgcttcgaatttctcctggggaagggaatggggtctctggcaacttatttttttttcctgcttgtatttctgggtgaaatcccatggaggcacaaagtgtggagcgggggatgctgctcgccccatcttattttaaaccatgataaggtggcaggagccttcagcgatcaggaaggaagagacaaccggagagtggcaggagtgagcagaaatgactccaaaacggctttggtatttgctggaggcctcacagagaggatgcctgccagtttcgtttttattttttattttttaataccaattcagtcaacacaagctaggcagtgtgtggatcactttttttaattgctgcaaatgaaatgcataattaaatgccataaattaaaaactgacactggatgatctcactatgtctgatccaacaaaacaactcaccccaaaatgtggagaaagcagaagccttccttcactgatgtgcattctagcctctgttgaggacatgcactcctgcaaacctatagatccaggaaaggtcctcagacctaccacccctgaaaatagtgatgcactgacctcctgtgtgctctgtggccagtggtgtgcacgtaggaaaattgcatgctacagatattctcctcccaagcaaagattcaacctggtcagacaaaagtgactggtcaacttggtcaaacaacaagacaatgaaatgacagaagaatggaagatagacgtgggcatggaataagttgtgaatctaaagtctaggcaggcagacacccgagtctgaatccatgggattaataccaatttgtgcagttccattttgaataattggctaagccaaaagtgtccagactcatctcattattaaatagaacctgaagcaacatcagccctgttctctctcttaaacaccaaactcaaagttctatcagttgcatccctttctttgcatgctcaggcaacaccttagtcaacatggtcatgaccaagctcattggtttctggcttggttgatggaagaaagaaagcacggtgtctccctgagccctctggtatctacccacccctaacacaagtacactacaagtccatgccattcatggcactcaatgggcctgctgtcgtctgctcttttcaccttcctgcctctggtgtttctcctttccagtgtgccctccgccatgataccaccagaggtggctttctaaatgtgggttggcacattccaccttcttccttggaaatgcttattaactctcccctggctgtaggataaatccaaaacctgtcaatgtgcccttcgggactttcttgatccttcgacctagtaatagtcaagcctggaggctacagcaccttccagagacctgaccccagccaggagagagaatttgcctttgaacgggccatgttcctgggcctcgagtgacccccccgggcaaaggtataaatgcaggtgaagtgcccttccctggcactcttcacccatcacaatcttgttctttgaaggctcagctcccgttaacagaccttcagttgggccaagtcctggaactactacaccatgggagaatcaccctctgcagctggcttattacctggtgggactgaactccctgaggacagggatcatttttaactcattttttttcatcttgtcatcatccagcatacaaatccgggagactcaagaaatgtttgttgaatacacaaaactctgaaataatcatagtcgtacattgcttaatgacaaggatatatactttctgaagaatgtgttgttaggcaatttcatcattatgcaagcatcataaagtggacttacgcaaaccaagatggcaaagcctactccacacctaggctgtgcggtatagtctattgctcctaggctacaaatctgtacagcatgttactgtaccaagtactgcaggcaattgtaacacaatgggaagcatttgtgtacctaaacatatctaaacatagaaaacatacattaaaaatatggtatacaagataaaaaatggtacacttatatagggcacttcccactaatggagcttgcaggactggaagttgctctgggtgagtgagtgagtgagtggtgagtgaatgtgaaggcctaggacattactgtactgtactgtagactttataaacctgtacactcaggctacactaaatttatattttaaaatgtccttcaataataaatgaactttagcttactacaacttctttactttataaactttaaaatttttttaaccatctttttttctttctttcttctttctttctttctttctttctttctttctttctttctttctttctttctttctttctttctttctttccctactttcctttctttcctttcctttcctctttctttcttcctttctttctttctttctttctttctttctttctttctttctttctttccttctttccttccttccttccttccttccttcttttttttttgatagagtcttgctctgtcgcccaggctggagtgcagtggcacaatcttgactcaatgcaacatctgccttctaggttcaagcgattctcatgcctcagcctcctgagtagctgggattacaggcagacaccaccatgcccagctaatttttgtatttttagtagagatggggtttcacaatgttggccaggctggtctccaactcctgacctcaggtgatctgcccacctcaacctcctaaagtgctgggattacaggtaagagccattgtgcctggcctaactttctgactcttgtaataacacttagcttaagacacaaacacattgtacagctatacaaaaatattttctttctttatatccttaccctgtaagcttttttctatttttaactttttttaattttttattctttactttttaaacttttttgttaaaaacaaagatacaaacacacacattagcctaggcctacacagggtcaggatcatcagtatcactctcttccacctccgcatcctaccccactggaagatcttcaggggcaataacatgcatagagctgtcacctcttgcaatacctgtggtagcaatgtcttcttctggaatccttccggaaggacctgcctgaggttgttttacagttaacttttttttataagtagaaggagtacatcctaaaataacgatgacaattattgtatggtaaatctgaaaaccagtaacacagtcattcattatcattgtattatgtcctgcatataattatatgtgctacactttaacacgactggcagtgcagtaggtatattcacaccagcatggccacaaacacaagtgatgctttgctacgacttaaggatggctacgatgtcaccaggagacaggaatttttcagccccactatgatcttttgagaacactgtggtacatgctgtctatctttgaccgaaacattgctatgctatgcaaaacattgctaaagtatagaacataattatatgtgctagactttcatacaactggcagtgaagtaagcttgttcacaccagcatggccacaaatgcgagtgatgccttgtgctatgaccttaggatggctcctgttaccaggagataggaatttttcagccctattgtgatcttatgagaccatcgtagtacatgctttcagcactgaccaaaacattgctatgtggggcatcagcaactcagacaggaaaaagttataattcctgagagcagtaccaggtaactgaggccatattctgaaatcaaaaataccaggaggcctgggtatttgcctcccctctcttccctgctcacctggaccagacaggctgctgcaaaccctcagtcttcggatggacttgaagctgtcagtctgtggctctgtcaatcacgggcctttcgaaaagactcaaattcattaggaggggaaaaaagcctttaagaaaatgttgtcagaaagaatcaatcagtttaaacatttaaaagtaaaatgtgcgtcagttagtctccatgggaaggttttcatattgcagggcattccctcctggagccccgcattctgaagtttccttctgaggctcggctgctcttgaggtgagggcaggggaggaggcagcagcagcctgtgagctgggggtgctgaggctgagtgagaagtggccatgtcattctctagcactgcacatctcacatggatataaagagatgacatggtttcaggttctttatcagtcagggtagagcataattatttgatcttgttttctggctggcattggagtatcctattcattcctctttttatttatttattagagacaggatttccctctgttgcccaggctggagtgcagtggtgtgatcagatcacagctcactgcagccttgaactccctgaatcaagggatccttccacctcagcctcctgattagctgagactacaggtgtgtgccaccacacccatctaacattttttatgttctatagagaagagggtcttactaagttgcccaggctggtgtcaaacttctggcctcacgtgatactcctgcctcagcctcctactgttctgggattaaaggtgccactcactgtgtccagtctctattaattcttcttgaaaagagagaagaaaaagagaaagaaggaagggaagaagaaaggaagggagggagggaaggaagaaggaggggaacaaggcaaataaagcaggatgaaagagagggagggagggagggaggaagaaaagagggaggaagagaggggagaggggagcaaccttcatccatttgcacttgatgacgatataggctccccactttgtgctctctgagtggctctcccagctagttaccactggcttcatttttgtggtgcagaggtgttaaataacttgcttgagcacatgcggctagatggaaagcatactcagaatccactcttttaacacattttgttttgaaaatgcaaaaaggtagaaataaagacaagtaaaagtggaaatactctcttcagccatgaggtatctttccagatataatggggcacaacagaccacctttggaatagagtttggaggtggggctggggatgaagtggtgggagaaggattttttggagcgaagaagggggctgaggattccacctgacacccttctcactgggtcagcatccaaacagtccctgggatggctttcttgggtgaaaattagtttaaaaatccaattgcatacaattttaagtaaagggacaatttctcgaaacatcagagtaaaacccaaccaatagagtaaaaaaccaaaccaaaccaaaccaaaccaaaacaaaacaaaaacaaatcttcaagtagtttcttctattggtctcttggaaactcaaatcttcacttgtcagcaaaccaaacagctgcctacatggggagctttcaaaagctttagcaagtaccatgttctggtttccctctcccagtgaatttccttaaacacctccccagccaaccagaaattccaccactggatatgacggtggcctcgacttttacttttgttcacatgcaaacatcttagcaacaaacaacttacatgttttcggtcccgacgtgcttgtcaatgcaggaaagtagcctagaaaggagagtataaaacatgaaaaggaaagggaagcataagccaatgacatccaaggctgaaagagagtggaaagaaccaaaaactgatctgacatccctccatctctctttcttatataataaagtactttcttcatggctcaccacagagcaatccaacatggcacccaggtaagtcatcatcagggacagatacaaaggaaaataaaattgtccacagagaaatagaaaaggcctggacatgccctcctctccagcaggctgccaccattaagaactgcacccttcccttggcacagctggtgagtccaggggactccaggcctccgtggttactgtagcccctcttaatctcatgaggatgtgacacagggtcggcttgctttggaagtgaacgggggagaaaagggacagtcaaatatctgtgactgatatttaaatttaaaaccaatgctattttatttattcattcatttgatttctttaaaaaattaccataatagctagaaatcccattggctgtcttgtgtgtgcatgcacacgtgttctggcacacgcacacacacaggttacatttttagggtacccagttcttttctaagcatcccggaggctctgaattgaaaaggaacttaaagctatataaatattcttcaaggcctatataaagaatagggtccccgccaactagtcacttactcttcgcttgatcacttctaataatagggaactcactacttccgcatgcagccatgcttcctgtttagacagctgactgttagattttgacttaatataaagatgaactttctgtttctccacttactgaatgcttttggcattccaggcactgagctaagccttccacacatatcatctttgtcaattatatcaacagccctgtgagacagggatggttttacagagaaggaaactgaggctcagagagacaatttgctgaagatctcattgttagttagtggtcaggttggggtttggtcctaggtctcctggcttccaaattctcaggattgaatagtgggcttaagcttccatcctatcaatggtccggcatcatagagccaggctagttccccttcccatggaaagcccggtaggaggataagaaaaactctcccatcttctctttctgttcacctccacccctacccttccctggaacctcatctttcacagggtaaatagcccattccccaaaccagcaaccttttcctaagcatgttgtaagtgacctttgtgaatgtcactgtggagtaaacaaataacatttgtatattttccatggtggtcacttcctgcctatgctgtcctcaggagcaaatgacagaggtgcagtcctcaaacaatcaccacctccttagtgtctcgcagcctcttctcgttgggccgggagcagggcctgcagcatatacatttcatctagctgatacctcctctgtgatctctcctgccaactggactctgaggtccttaaggaaggctttattcatctttgttctggcaacacctggcagggctcaggtacacaactgaagctcaacacctctctgcaggaggaaggtatgaaaggagaaaggaagaaagggagggagaaaggggagacagagagaaggaggaaaggaagaggtaggaagaaagaaatggcggaagaaagagaggaaggaagaaaggaaataaagaaggactcaattaggggtaaaattacttaacttttatgaaaggaaagccattcatataaataaagtcacttcctcttataggaaaatacaaaaagatttgggatataatcattggctgattatagagataacctagtgatattctaccatttggaaaactactttttagttcttactggtcaagtagtaaatcggaagtatccaaatcacaatcatttgtttgttcttaaaaatctaaattaaggccgggcgcggtggctcatgcctgtaatcccagcactttgggaaactgaggcaggtgtatcacctgaggttaagggttcgagactagtctggccaacatggtgaaaccctgtctctacaaaaaatacaaaaaattagccgggcgttgtggcgggcacctgtaatcccagctactcgggaggctgaggcaggagaattgcttgaacctgggaggtggaggtttcagtgagccactgaagagatcatgccgctgcacaccagcctgggcaacaagagccaaactccatctcaaaaaaaaaaaaaaatctaaattaggtaaattagaaatttttcaaaaaatgaaaataagtgtttgaatctccaactgcttttgagaggttggcagttgtggccagtcatttcttcctggcaaaagctggctgaagttgagcggcacatgctggtatagaaggagctcctgaccctgggttcatgatggaccctgcccagacccccacactttgtgtaattcctgtctgtccagggagctgtctgcaatggtggcctctgtctttcatctgtgtgtgttattttcacactgagtgaaagtgaaacaagttcattcattcttgtccatggatccttgcaaatctccagctctgaaatcctttaattctaagtcttgttcttaaggtgcccaggaaccaccagcactggccagccacacagaaggcagtccctgcaaccttgcttagtgacggtgctgagccctccacttaccagctccatttatgaatgctagtatttaaggcctgagatcttattttcaaataaattgcagcacaccaaactgagttttgttttgggaatttgtgagattgtctcaagactagccccctaatgtggggccaaacagcaaggacagaaaaaacatcagggttccaccgtctcccagtccccccaaagccctggactatctgaatgtgacaaaactaacttgtattctcaaatgtccatcctacacatccccagcccctgtctcacctgtcagtctctctcagttagtttgcaaggaacacaaaattgtatatagagtctgaaagtgaatagactatgccttcatggcatggccttattggtgaaaccccaaggtcaagaggcaggagaacccacagcacctctgcaggcagggatgccttcctgaggctcagttttggagacaggcaggcgctttatggggcctgttagtgggcaccatatacatcagatgactcagtccgctgtgttcctcttgatgccgctgaactgcttgcaagacgatttctttgagcttccttcctcccttcgtcgagcagagggggtaagtcagggaacgcttttatgtggctgctgcgtttccaaatgttcctctatgattgacagctctgcattcagcttcccattatggcacctgcagataatgagatatcttgaaaccggaatttccagcgcctgagcctgccaggaatattatcatcagtgttctagaaagccattcccgctgcacacatgacctctacaaatttgaaatgtcaaaacacagccaggagctgaaaccaaggccactccagtccaagtggctattggctcttgaatatacaggaaggagtcctctatcttgggagaattatggattaccagaaaatagtgatcttttcattaacctatatgtatttagaatgtagataatgtctgtcttttatcattcgcatagcctgtgtgtggggggacctgagaaatgaaggcctgggcattccccagagaatccaggactctttgggggctaactcaggccatcaaatctcctcatcctcagtggcaatctggggcttaattttgtagacgttatagccacctagaccttgttgtgttatcaaagaggataaaggtagaggaaactcagtcctacctttggaattggaagtttaatcttctacttgttcattttcttctgtctctttcacttgggctacaagcttagagtcctcagcacaagggggttatgggctcacctgtctactcaactgagcttctggtctgtgccattcactatgttgtgtgcttaatatgaattagatattttaggagcttgctatatacagacggtggcacttggtgaaggattttgttatcaccctcaacagggagaagcagagggtcaggtgactgatggggggtagaaggaggaaaagggtatttggagagcctgctcttggagctgggctacaaggttgggtgggattttcttacaggcataaactgatgagagtgagggtcatggattgacaggttttacatgcagatggttgctcatgaacaaagtcctgtaggtctagaagtacatggcacatcttgggggcagcaagaggttgggagggcctggatcacagaggggctgcacacaatgggagacctggctaaagagggcaaacaggccctcccaacaaaggcccgagagccagcagggctgggccatttccccaaagtctgaagactcggagtctgtagaaatggctcttacaacctttatctctttcttcctttccatgttgttgataggccagtcttccctccctctccccagttctccatccacggcagagttgaccctatagctaggttctaagggcagacacagaagccacatgcggccaccttcaagagctcttcatcgttccatcagagcgactggttcaggatgaactatgacccaaattgggccactgagaatcagccttgagattttagctggtgtcttcatgagccaggtctgctatttccacagagatttctaggcaggcaaaatagaagcttggcactgctggtggtcatcttgcactgcctggagaaagatgagctatggatgtgccagtgtggaggaacgcagagcagagatgggaaaggtggagttctcctggtgtcattcagcacctgacttcagccatttctgaagccagcttccatccctggattgtaccctgggagatgatacatttttatttatgtattacttgaaacaagttttagttgaacttctgtctcttgaaaccacaaataatcatagtatgtgtaacagcacgcattggcatagcaagtagtcctgttctcaccacaatggctttggggataacgcattggtacctgattggatattgagatgaggtattgcacaaacagttgaaggctatgcatgcacatttttctagacacttcactacttttctactcacttggtctctctctaagacctcagaccctgctgacaggtgcaaagacatccactccattccctcagtgcagatcttctaggtgtccacaagagaagcccattaggaccccaaaactcagagctagcaaagcagaaaactcagaccagttactccaagtggagctacacactcaggagatctccgtggacaggttcagaatcccactgaagacccggtctagcccaggtcagcatgggcagactcaggagtgggagcctgctctgggtggaagcccaagtggtccagaggtgtcccctgcaggggggcctctagctaaactgggtgggacctcttcctccttcctcttggaggctttggctacatgggggagtgagcaatgggcctcctgctcctccgggaagcagatatggctgaggcctgccctcctccaatggggcctggacagcaggcttttctcagcacatgaagacaaattcagcccagagggtttctctcctggttaagctaaggatatgaagttggtcagggaggacgaaccacattcttaaaaggcatcctgaataaaatggctcaataaccacagaagattggaaaatcatattccagtgcctcagaacccccaccacacatgcacacatatatacacaggcacacatacatatatgcacacacatgcacacatacatacacacataggcgcaaacatagacatatatacacctatagacacatgttcacacatacacacatgcacacacatatatgcatgcatacacatgaacatatagacacacacatacacatgtagacataaacatagacatacagacacatatagacacatatgcatgtacacgtatacaaacacacatgcatacgtgcacaaagacacagtgcacacacagacacatacatagacacatctacacatatagacacacacaaatatacacatagacacatatacacatagacaaacacacatatagacacatatacacacatagaaacagacatacacactgagacacacatatacacacatacacacatagacacacatacattcatagacacacacttacacatatagacacatctatacacatacagacaccacaaatatacacatagacgctatccacacatagacatgtaaacatacacacatagacacacacaatacaaagatacacacatacacatactcacataaaaacacacatgcatacacaaaggcacagagacacacagacacacacatagacacacatacggacacatacacacagatacacaaacacacatatacacatgcacacaaacatacacagagacacgcacacacacacagccacacacagaaacacatatagacacaggcacataaaacacaagtacacacagatacacactaacaccaatatcacacacacacatacacacacactactttctaaagactcgaaggagtcctatcagggaaaatgcacacgacttgtctgtcaggccagctggccctaacaatggaggcgtgtgtccccactgaataattgaccttaccccaggatccccagaaagcttttttttttttttttttttttgtttttcttttcctcccaatagcatctgaggacaaagagacacttgcagtagcggaacaggcctctccgggtaaaattagaactgtctctagaaaggtgcacgcatgtgctccaacatacagcaaataatttattgtcaggtgcaattcccctgcttgaagatcgggtggctctctggccatccacgccagactggaaagcagtgtccctagtccccggatcctgtccagctgagcgtagacggcagtagccagggactggcagcacaggctgtgtgaccggggcagggctgggagagaaaatggccgccctgtcgccaggtccttctgtgtgtggccctgtcaggaaggagccggagctccggccggggctggctggctcccgctaagtactaacgccacggtggcggtgggggacaggagatgagagacagaacagggcagctgcaaatggaaatcaccctagggaaggttacaactagataaagttttcgacaataagattccagagactgctgacgggagcaaagctccgtattttagtctcagtacaaatttgcttcaatcttatacaactcccatgcagcattgcccacagctgcatgctgtaaacaacaaacaaatctatttccatcagccctgctgatgccaggagaaaagtgcctgagcagaagacatgcacagatgcaaaccctcacctgagcctggcgctgccctccatttggcctctctaacttaatatcgttgttacaaagctattggtctcctggtagctagctggctcaacgcagtgcctcttcttccagctaatctgacaactccgatccaagaagcatcaagggcccaattaagaagacacatcttatcaaggagcttattttgcataacagaatacaaatgacgaataaaaatttaatgtttaataacttagtacaaagagggctgttgatatagaatgcctggaatttttatggaggctgtcagacttgtgataaaactgttatataggaacacttggcaaaaaacagcgtagaatttttcagtaatggtgtgtgcatgatattgcattaattcttgatagggaactaactgtaagccagtttgagtttcagtgtaagatggtgtgtgtgtgtgcgtgcgtgtgtgtgtgtgcatgcgcgtgtgtgtgtcgtgctctatccagaatgctctgagggtgtggctggacatgcacccatgcctttatggaggagaatcaaagtgcattttattgaggactttgcagagaagttgctcagtcctgcataagacatctgggtgtgtcttatctagaacagaaatggcaggaaatgagtggggtcactttctgtagtaactatcctgacaccaagagttgggcaggattcttaagggttgcttgggagcattggaaattctccatgacctctgtatgagggtgagtgtgtgacacggaggaacagtgtgtgggagggtgcctcgctagtctctggtctccgaaatttgatccctggaagcagctaatagagatatgcacaaaaattcatgcctgagctggatacttatcgactccgcagagctttcctattgctttagccatgaggacatctttcaatgatgctttcattcaaatatttactgacaccctaaacttggctcagctctggaaggaaagccacagttcttccaggcccctctagaaagcgggtctgtggccacaggattgactcttgtctctgccacgcactacctgcaagatacttgaacaagttacccgacttctccaaacttccatttcttcaatgtaaatcgaattatgaatggtacctacctctctgacttaaagtgatcacccagccttggcatttagcacggagtcgggagcacaggaaactctggatgtatatcagccttctatcacgttatcgatgcatttcagagcaattgcatctcccaagctttggcccagaggagcattggtgtccacactctgaatggctttaggctgattggaaaaattcttgacattatggctgtgtctccacaaaattccaaatgtctgtcgagagaaattgagccttcatctctagtaatgctttatttttaaagtggccattaactagggctaaactcctgctgaattagagaggaaccctttcagatagatgtacatatcacatctatatgaatgcaagatgaatttcatactcatcctgtcctattgcattagtgttattacattgaatactaaatgaatttctaatgattggacactcagaggaaaatgtgacccttcacagtagtcgtcaaactctataggtggattggaaattgtccggtgggggcttatcctactggcaaaaagaacacacgacccaaaacacaaccttaaacattattgtgtgggctactggaaagcataatttacttgatgaggctaatattcaaatgcaaacttatattagaattaacactacaggaggggcttttacatggaggatttgttacagaaataaaatctatcggtaacactttcattgttccatcattatgatctcatttggtattcactgtaatggcaccgatcataatgaatttgtttgatattcatgtggttctcccacacattaacagagtttctgttataattcaccatccaataagcattagttaatgcagactttagaccaataaagatggtctatcccacccctagagttgcctggagctgtctaagagttcagggacattttgatattgaatgatcctcctgcttcctcctggttcccatgccatccctcaagctggagagggctttctgaatcccaaactggacataaacaagaatggtctccatttagtttttggagcccagaggagcagttggagctgcaccctttgatgccaccagttcaaccctcacagatgtggactgtagaattaccctcctttctccctgtctcactgggactccatgggggcccagctaaacaatgctcccagcaaaatgctactcatgccagagtatataagccagtccactctccaaaataacttcctacaaaaaatttcagggctgtgctttggcgtttggacaaatgtttactctgccttggatccctcagccagggagtgaagccagtttctcagcagctctgactcgttggcaatcaagtaccccaaccccagagaaaataaaatctgactgatactggcccagttacttcatcacttgtcagggcactgggtgagagctctctattaaactctctggtaattaaacttgtgaaatgtccctatgatgcttcttagtaatgggtttacctgagtgcactgtccaggagggacttgccttgccatgccactgggagggatggttccatccctaaccaccactctttctgtttcaattgcccaaatatttattacaaggaatggcaaaaccgcaattgcttttgcaccaaactaataatactcatccagtacttctagaaaacttgtgagccagcatcaattttcaagagcaaggtgctgcccacgattatcttgaaaataatgtctgatcagtttcttagtacttggagaactctgacctccaggctaagggcatgatgtgcaaatccacactccttaaatcttcagtgccttttgcaaagacacactctaaccccaggcctgaggtaagaggacagggaagcaggtcttctagtgcctttgtaagggatgccggtatggtgagcaagcatgtacacaatccaaagaggtggggcttcctgtcctcccagaaagaagtgaatcctcaggaggatttctcccctggctatctgagcgtctttggacaagttgcttgcccactggcaatcaaatgaattaaatggcccagtgatcctcaaaataaacttttccatctgtaaaatgaagataatataatagttgcaaagattaaggaacctaaggtatgtagaaatagcactcatccaagctctaacataaagtctggactcaaactgcactagaattcaagattattgcatcaaacagcacgttagcatcttagctggaaacagatgttcctgctccaggctgcccccacaagtcaggtttgctgggcctctttcattgtctctgcaatgtggagtttcttttgcttcagagttatcctcacggctgtgattctccagcatctgtagctagaaaggagcaatgcagaatcctgggaggtggatggaagctgcctccctctgcagtgttaggtagaagttccttggattgcttgggtaaatgcaatgatttccttctgccttagtcttttgttgttgctgttgtttttctctccaatgtagcaatgatttcccattttaaaatattaagccactaagctgtaagagaaacaaactcctttgggcatttttaacattacctcagcagaggaagaaatgtcacatggtcctataccgcactgtcctcaaagggaatgtatgcctggccccaaacatagcttcctccttagcaggacacaaacaaagcagctaaagatggaggttaaggccagtcgactgcttccaggtaagccgcccttgtagtccctgggatgaaatagggcaggcaccagaggccctgggctggtctgccctagttttgtgggttcctgtcaggtcctcagagttatttagcatagttttgggtgagatcagttcacatagagtgcagtataaataccatccccaatgtgccaagaagcagttcacgaggtgtgccctcaccaccagcccacaagtcacgctgatgagctccgcgtaacctcaccttgaattagtgaactgcgacttgaaaaccatccttcaagtgtgtacaatttttttcatttttttattttgaagagacacctacttgagagaattcctctctggaatttaagaaataatgaatgtggacctcaccagcccctggccttttcgtagttcataatgaaaacaaatgttcatttttcctttaaaactgtcttgagctaaatgatactgacgctttcaatttttaacatcataatcaataaaggctgcttatgcacactttgcaaaaccatcagtttagaagtttgaaaaaaaaatctgcatatggctgcagcttgctggctggaacgctctcgcactaaatcttctgagttaaagttttactggtgtgttatgagtaaaaatgccttgtcagccatctgccagtttttctcctaacatccatatttccaacccttgctaaacattgggagcatgcggccacaagaggccacctctacaattaaacagccaagcgcagcagcagaagcaagggcatgtcatgagagaactgtctagtattaattttaaaagtccataaagactagctccgacccgtccaggatgatagacgggctgtgaaatgtattagaaactgttaaccccaggagagtaagaagagggcagaaaagcaaaaagggagagaggaaaaaaaggaaagaaagaaggaacagaaacaatcacaaacaatgcgccagtgtcaaaagcttcaataagtgctaatcatggctgattaatcagtctctaattccactgatccaaaaaggttacagagtcaattgtgtaaaattagctccttctcatgtgtccctctgcatttcgagcctctgtctgttcatttgcatcttttgccaatgtttactaagaattcagttcattagctcttgagcataaagtcagaaattggaggggactctgcattttcttgctgagagtagtgcttaaaacaaatagcatcacttcctcaaacatttatagattaaactaaatggcattaattaccgtaaatctcctatttgtgaggagaaagaggggggaaagaaaaaaaatcctctttctccatacccacagtttcatggcaggattgttccattctcatctaatgtctcatacagttgggggcaaaatgtttaatcacagaattaacaggaagcgaatggcaagggaagctaacaaggcgtgctgcaaggaggctagctaactttttatagagccgtgttttgcaaagctcagaagcagaaggttgcttttgaaagcccttattaaaaagagatccctgccacatatgtagaagctatcttgggaaatacctgttttacccgtgtttgaaaatcttgaaacctgccaaagggaggtggaggagccagcatggggcctggctcaggaagtctgcccagggcctcacagaggaagctggggattgacatgggagagggggagctcctgcgtgttttccaaaagtgcatcttgtgtgtttcagaggagagaatgtgcaagtcaaacaagcggaatggtttgtagagcaagggggtaatcttgcaagaagccacacacctttctgggaaatgtgcagaattcttggtccttggaaaggacaagacgccacctgttcagacttcatttacaccaagggtgtcgcacctgctcctctttaggagacgtgggaatggagcaggagtaacaccccagagagtcgtgttggcctgggagggactagagccttccggagctccctgctgtgtgcacagccaagtatattttaaacaatgtgctggtgctgatcaaacccaggggggctgcttgcagaaggctggccacaggcattcactctggatctctgggtgctctcccctcctctagcttaagtatattcacatagtctggtccctatgcctctgcttctattttcctacatattttctgcctgaaatgcctctcatcctaccccctgccgacctcttctttccccaaatcttagcaaagcatcaacgatggaggaataggtattccaagtggaaacccttagacattggccccaccctcccagagctcacatggagcaagggaattctagatacataaggaagtaataacaatcagattacatgatgacagcatcacctcctccagggagcctcctctgatttcctcaggctgcattcctgtttctctatcctgtgtgtctcttagcaagggacttcctgttttccaattatggtttctgtttctatcttaccttctgagtgtgagcctctttaaaattttttttgttttgttttgttttgttttgtttttgagacaggatctctctgtcactcaggctggagtgccatggcaaaatcatggctaactgcaacttcaacttcctgggctcaaatgatcctcccaatgcagcctcctgggtagctggaactacaggcatgagccaccatgcctggataattgcttaaattttttgtagagacaggatgtcactatgttcgccaggctggtcttgaacacctgggctcaagtgatcctcccttctcagcctcccaaagtgctgagattacaggtgtgagccattatacccagtgatgagcctcttagggataggacaatatcccaagaccaagttcatccccagaccaagttcagcgctaggacaaaataggtgttcaatacacacttgttgaatgaatgtacctcagcaaccagaccctcattttgcaatgtgctgtacagacactggtcctttccttctagctgtaaaatgtcatgactcaggactgggcctctgacccctctggtcccaggaattaacaggtttgcagaaggtgtggggtatgtattaataagatgtgtagctattaatccagcgcaagatgagatgattaaagtgaaacccacagcaaggtccagatttggggaataatgtgatggaaagttatttattacctctatcttcctttatgtctgtgtatctgcccattgctaaatacaagcatcttgagggcaggactatcttgttttcttcctgaccctaaaatccaggacaagcctgacttgcagtagatacctacaaagtatttgcaacggaatcagtgggtaggcttggggcctaaagcacaaagcccctttcttatattacagcaaatcaaggatcagagtgtctaagcctcctggtgcttctgtgcccatgtaaacatacctgtatatccgaaggtgaaagtcatttatgtcaaagttatgcgtggaaatcccttaggatggtattttgttcgagacccacagtggcctcccagttgggtgagcaagccatttttccctcccgtgtagggtacaccgttgaatctcgggaggaatattagaagtactagcttgcctttatgatcctcgttgtatttttaaaaatatgtcttttattttgtaaaatgtaatgcaatgtagtgagacattcccatcatgggactgagaacaactgagggtgtaactccaaggtcacatcacccatcatcctcaccctgggtgaggtgaatgtcagcatccaaagtccctgcactgctaaagcagggtctcctatagtgtcagtaaatctcctctgactgcccagcactcacttactcagagaaaccacagaggctcaggtcagcattaaggactcaagtgggtggcttctgagcccagcctgctgtttctagaccctccttaggctcacaccaggtgggtgcccgggcagagctagggtgggctggcacccgagaaggaagggcgggaggctccttagagtgagctcctcggctcgcctctgcttcctgattcatcatgtttttttattagctctcttttctctgataaacctttgcagaagaggcgctcttggaaacagctggagcaagtcccttcagcaggtggagtttggcagacaggttcccagatccagccaccaaatcgctcaagctcccacttcaatgaggggaaaagagagctgcaacataaagcaggctctgctttcccacctccttgtttaactcacccaagaataaacgcaacaagctgagcgtggagaggcttctgctcttcaacaatgcagtgggtcccagacaccccgtttctaccaaggagattattgtatttattttattttattttattatttatttatttacttttggcaaaaattcttcttgagctatctcttactttctttttttcttttcttttctttcttttttttttttttttttttttgagacggagtcttgctccatcgcccaggctggtggagtgcaatggcgcaatctcagctcactgcagcctccacttcatgggttcgagtgattctcccgcctcagcctccctagtagctggaattacaggcacttgccaccttgtccagctaattttttattattagtagagacgggggtctcaccatgttggtcaggctggtctcgaactcctgatctcaggtgatctgcccacctcggcctcccaaagtgctgggattacaaccatgagccacagcgcccagccctctgtctttctttctttgctgtcttttttatgttttgtctattcaatgagggagtgcagagaaggctttgcttggagcagacacctctatgcattctcctttcttgcctgaactttctcccgctttctgcactcactctgtcctccttctcattggcttcaacctgcaatccaatgcaaaagaaaatgggaaaatcaagggctttcttttccattatttaatgtcttgtttttagatttttaaaattctgacctgaaatttgaaaagacattgatacagcaccagtcatattctgttttaaattctcatcagaatttgtactcatgtcggggcaaagctatgaggagatggccaaggagaagtgctcaatgcccccaaccccagcttttcttccccaagacaaagtttgggctccatttccttatttctttccatttgtgtttttgcttttacatgatgattgtgggaagtggctacaatcagtgacaaccagcaaggtaggatgctgctgcccaaagccacagctgacccagaaagacactcccagattattggcagcagcggtattttaagaatttatagagtggaggtaaaaagggctttctacactatgaagtgggcgagttggtctcactctgggcgggaaaatttatttcaatttgcatgccaattgtgatggattggtagtaatggcctggaatgctgaattcaggagggttcactggctatgcctgtgctgagcagaacagtggcctcccagggccagtgactttggccactgagctaatgggaaggaaggtccctacctattttccttctggggctagaatctccgagctcattttcaaatctaggcaaggcattccaaaatcaagaaacactccataagtccataccagatacagtaatcaacttatttagctttctctgagccatcgttttggcaaattgaatactctatggaaattggtttttttcatgggacttcactgcctccctccctcacccccttgcactattgctgtaaaggatgctgagatatcagagtcaagcattcagttgtttcagtttctttgatggtgattagcaaaatagaatatgtgtatccttcaaggggagatacaattccatgaatgacgatagttgcattttctttgacatctttgtagctgccatatccatttgcaccacaacctgtatacacatttaaaaaaagacaaaaggaaaaaggtaaacgatcatgagatgtatttcctgtaatatttaataatcacattgaaacactgacatgcattgcgctgcatttacaaacctctgtttcctttgaaaattacaccctagcatttaattcaccaaaataactcattttatacagcacaacaatgtagtaaaataactcatctcgaatatgtggatatgaatagatttaacacatctgcattgaacaaaatgaattaatctaaaagccgagaaactgctgttctctttcgagagttaccgattattttaccattcccttcagtttacttgtttgtttttgttaaattacttttggaattaggaaatgaggaaagcagaaacactagttaggtttttctctacttggaatggagaaacgggacataaataatcatttgcattataccttatttctttaaaaattatatttacaattgtgcagagaccaaggagaggcctctgttcactgtgggcttctgtttaatctttggaaaatactgtatttccattacaaccctctcccaaaagaagtctagatattaaaattattttttgaagctgactgtaaagtgctaaaaacaaatcagagttcaagtgcatttcagggctcccccctgggaggatattcacttgtagacgtggagcccgtctcccgaaagaggagatgcatatgtgttcactgcatctgaattctcgcacacggggctgtgggctccacagtgcagcattcccaaggctcagtggttatttctggccctggccgtctgggcaggcacaggcatcacgaggagaagagcccatctgtgctgatggtttgggatggagtgtggtgacccaaacccacagctggaaagataaacccaagcacactcttcatgtggggcacaggtgccacaatctgggtggctctgacagttcctgggtcctggagggcctctctgatgcaattaactttgagggcaaccggcaggatctactgggccccattcctactaactctacagcaaatgcagccagaaggtctcccttccatgagctgggacagaaatggagaccacctttgtgcggagggatataaaaaggcagagtccccaaatcttcagatgcagagccttcaggtcagagtttgcaaatggatcctatgtcccctttcttgcagaaaccacattgggatgtagcacccaccacttccagtttcaggctctgcaaaatggagacagtttgtgcagtcacttaagtgcagaatctttatcttcacgatttcttgcctcagacatatactctactatactactatagcttcccttgtaggaacttttatcagtactccggtctctctggagtctttccaaagccttcaacttagttttcatagggaaaaaaaaatctaatttttcacctcttatttgatcaatgtgcacaatttattaaattgcataatgacaattacaactaaagcaggtttgggaataaactcatctgattcctgggaaatattcagctcacccagtgcaccccccctcctaccccaaccttgagcactcaggacactatgggcctcatcatccagggcatcttctagaaggaatggtggctctggctacctctgagttggtcaagagagggctggttaggggagtttctaagatcgaccagatatgatctaggagatattcaggctatgggtaggcaaggtggggaccatgtgacgggctttcctactaaggagtttagagattctcctggcagtaataaggaactgcttatcgtttctgggagagaaggaagcaatttcatccaatttgccgtctggaaagctcactgggttgcagtagggaatggactggattattgtttcttagcctttctcccgcccttgtaatgggattttacacccatagctttcgtgaggtgtgtgcctttgccatctctcccagtagagtaggtggctctttgtctttggacttaggcatgtggctgctttggtcaatggatgttggggggacatgagggaaccacaggctttgcctgtgtctgggggacttggctgtcactctatcactcctgcagtctgccaggaaaggaacatgcccaaggtggtcacgttcccttcagcctgagccttggaatgagaggtaaaggagcagacctgaatctgacttgcagcctggagcaaagttgccgtatccgacccacaggcccagtgagaaatgcccgtttgctgtgagctttgtaacaaacaaccctcagccctcaatgaggatgtgggttgcaattgagccatattgcagatggctgattaatacagaactggacaagactgagtgggatgggaagcaggaaacccatcactctctctcacccagttgggtgacttcaggatagtccgcgtccctctccaggacccattttcttgttggcaaagtaaggaagtcatagtaggtgatctctacgggccttgccacctctcaggggccataacggagcagaagaggagatagagcatcaccttgccctggctggggtacagtttctacaggagggatgatttccgtcactttcaccaggaaagggtcttggtcttcacgtcgtttgcagtccacaggatgccaagacccatttggcagtacaaaaggacatcctgaaacagcacatcccaatgtccccaaagtcactgcaagtcattcccatcaccccgtcccgtcccccgggctccactcacacaaggtgaaatcttgcatgcatgtatcctaaattccttgccctagctcccttctctggtgctgggggcagagcattcctagagaaggtcttagggtctgtggggggctccttaccaggcaggagactttctgccaggagccaggcctgcagggagcagctttggggtgggattttcgaggaagagtgattatcagggcatcggtaataaggggggtgggaagagcatgagaagaacaatggagaggcctccccggtgcagtcactctaaggtatgtcaccttctccgatgccagggccactgtcagaaaggcaacttcatctaactaattagcagggtttgccactttacaaatctgccgcggctttcttggcacgaaacagccgcggaggcaaagagctgtaggaacccattaaaaatcacagggctgaaagaaaaggagggcaagggggaaatttgagataagaggtgggggaaggaaggaaatttccctgtaccaggccagctgccggctcccctctctctgtccacatgcaagcaggaagtggttaaagtgatgggaaggggaacccaccctcctcttgagctgggcctctgatctctgcatctggtttttcctcttgaagcactctctggttttaaagtggctttgaaggaagactctcctgtggactgcaacctgtcactgcaccctgtcatccatccagtaattaaaatctgactgatttactgactggtaccgaccatcatagctctggagttagctgatgttcatctttcccaaggctaaagttacttggtgaaaagagaccgcttgctcccaagctaagctgtcatacagctgcagtggagaccataaagatagctaacagagccctcaccagccatctttagtttattttattctaatatttatcacctcccagcaaatgaacataatacagacaagttagggagaggtgtgcaggctgatttgtgggtccggtgtggcaggccatctaaacactggacgggccacactgaagagcagggcatctccccgaagggctggccaacctacaaagacttgtgggttggggaagagtcttgagctctgaaaagtgaggctagctgtgtgcatgggaaagggtaaaggaatcagggtcccatccaggggtgctgagtttcctgagccacccagcagcctgtggggtgacctatcttctccatcctgtccttgcatagtcttgactttgctatcacagttccgggacgtggcccatcctggcccttcttgtgtaaggttacaccagagctcctgtgggaggcagcctctccccacatctccagagctgctagacctgggctctgcccccatgaactccctgccagccggctccttttctcctcttctctcaggatcacttattcattcattttgtgagcgtctgcatggggccaagttccacgctaagcacaggggtgaatttgtatagaacagaacaggcctgatccaggctttgtgggactcacagttcggtggaaagatggaagcattagacacataaaggcacaaagaagtgcatattaatagtggaggcaagggctctgaagaagcagagtgaggggaagagagacaagagtccacagacggagcaccatgcaaactgaggaaagagtgtggagctgctctctgggcagggcacagactagagagaggcaatggggtgcccggagagcaaattgcaaagagactttgcactcagggaccagcacatgcagggctgcagctgagagtgggtgcccccttcaattttcattctgggaagctcacccacctcagtctatcttggcacaaattggataattgtatgtctctctctctctccctctctctctctctctctctcactctctctctctttcttttggagacacagggtcttgctctgttgcccaggctggagtgcagcggtgcaatcatagctcactgcagccttgaactcctgggctcaagcgatcctcctacctcagcatcccaggtagctgagactacaagcatgcacaccaccacacccagctaatcaaaatatatatattaggtagagacaggggtctccctatctgggagttgcccagtctggtctcaaactcctggcctcaagtcatcttcctgtcccggtctcccaaagtgctgggattatagccgtgagcactgggcatggcccacttctcatttttgctgaagcaaagagggctccagtactctctgcaggtcactgcgtctcccagctgacagccatcagctcgcatgtcttataaatcacgaaaccacacagtgatgcactcatacaactccctgggctgtgggtattaattgtgcatgatgatgtttacagaacaaaccaaaaatccatataacattacatatatatatgtatcattttttaaacaaacatcattataacgttacatgtcatatatatgtatgtgtgcatgcatgtatatactttttaaaacaaacacaatggctgttttgtcaagaaaattaagtggggggatgtagggagaaacatggggagaacgtacaagagataaggagtttccggggtctttgttccccttgccctctctgcttggggaggacttctgtcctgctgtttctgggacaagcagtctttggaggatggaactggggttgggaataccttcagggcttggagttggatcagataaatccagatgagataaactaatatgagatattacagaccatctggaaggactaggaagggtcacagagcaagtccacagagagcagacaatgagaaggagcaggttttctgacccttcccggggctctcctcaccaccctccaaaactaagggttcatttctattgtgtttgcttcctgttgtccttaagtcagagcagtgattctaggtcctcgtgaaacccagaacattacgcctcctaagctagacatcaataggaaggacacctaaaaactggagaccacagtacttctccaccaccaaatatgcagccttcacagtcccaactacctccttacatgctggtgcaaatcgggcgttccactcaggtctgagggtgccaccagccacctgcacacctgcgcatgctcagtggagctcagtggagctcaccggagcagtcgtgtctgccagacaaaagctatggctcttgggaagagagggaagatagcgacacagatccagttactagcaggaagcccagtttgttctcccgattcagtcccaagcatcccaaaggacttcaacttctggggagcaaagggcctccttcacctggttagaaaacctcgagggaagaagaacagcgggtgagaagagtggaaggtggtgtttttattttgagtaaatcaattggctaatcagggtgggattttccatctgggagttgaaagggcaaaaggagaacagttaatttttcaaaacttcactttaaaatacaagccccctgtttgtgagctacatttgatgcagagtctaggcgggacatcaagaagtggcgtcagggccagaactagcatagtttaaaagaacagcaagtaaattaagacaattaggcattcttaatgcccagggattttttttgtgtgtgtgtgtacatttttcttccaaaagagcctgcttgcaagacagaatttcttcttattttctttctttcatttcttcttttttttgcattcacactctggatttttccttgtatttctcttggggaatgcatagtttggtcctgactagggtgggtaccaggctgtcgctggtagggagcctgtcctgtcctaaatggctctcaaatggagtggaagggggaagggggaaggggaggactttttaaaggtacaaattccaccaactcctggagaccccaggtagaggtcagtaaggttaagtgagataaaaaagtgaaagcatttctggaaattcttaggaagaaaggtgctagataaattctagctacatttatgactatttttatggcttggcttgtaacactgtgggtggtccctggacacggggctcattcattcagctcacaggaatcatgaggttgagatctgcaaacagatctggctctggaatggtggatgggatggggagatggctccagcagacacctcactaagggggcaggaggtcactgtaaaacaggaagatcagctgtccaatgatggaaggcacatttctcaaatgtttctgaccgttacccatctagactcaggcacacattcaccctcccattcccattcttctgtggtgagagatctggtgataacaaatggagaataacaaaatcagccagttgctagtaacacacataaactgtgtattatttactctatgagagatgaagataagcatatacacatttggttttattttataaaacaatgcctcataaagtaaacactagcccagcaattttattgcatttaccttgataatatgttgcaagccatttaaagagaacaaattcactgacagaccatcacccatgaagtatggctatacaagcacaacagtttggggataaagtataaattggttttagcattaggagcaaagatgattcatacggaaatcacaatgcaaacaggtcttcaacttaaataacaaattttaatttagaggtcgataatacttttagccaaaaatgtgttcctgtctacattgtagggttgaggaacaaactgcagcaaactggtaaggatgcaaagtttaatgtaatttgtaaattgtaaaagcaagatcggcagctttgaaatatcacgatctactcaagagaccagtcatagaatgaccttccagaaagtcctatactctgtatggggccaggtgcaccagaaactctgccctgctgccatccagacttggtagaagagttctccacatactctagtatattcttaatttttatttatgaattcttcattacattaacccaagaaccttcctaatggattactaataagtagctctaggtaacatgtgaatctaaaagtggttgtaattcacctgtaattcaccagcccaggacaggattcatcccctcatgtggatagtggtggccttagggcaaaagtaacaattaccgaaaagaaagtgtaaactaagggttataggagtttggaggaaagaggatacttttggctgggtggaagatggggagcaggggataacagggataatagcttaggggaagggccctccaggaaaacagacccccaggagcaaagtcttggggtgagaaatgaacaaggggagaatgagtgaccctgagtggctggagaggggtgtgtacaagaggaaatcatgggctggaggactggtcattatctaatggatgatgctctgtctatggaaatccagccaggcacagaggctcatgcctaaaacctcagcactctgggaggccaaggtgggaggatggcttgaggccaagagttcaagatcagcctggacaacatagccagacactgtctctacagaaaataaatgaataaataaatatagttagccagacatggtcatacatgcctgtggttttagctactcaggaggctgaggcaggagaatcacttgagctggggaggtcaggctgcagtgagccatgattgtaccactgcactccagcttgggcaacagagcaagaccttgtctcaaaaagaaaaaaaaaaaaagaagaagaaagaaagaaaagaaaaggaaaacacaaactagaaatccaactaagtggtatatttgcaacataaactcttctgattctgacaccaggaaccacgttcatgcagaaagctttgcttagttactgccgcaccccaagaataacctgggcacaactgcaagtggacatgcacagtccagagatacagtgaagatttagtttcccaaagtgatagactttcctgtccagaaaacctgcagcaagatcccagtataaggatcgatagggactatagcttaggaaaacctctttaaggaatataaggactttaaaatctcattaaaaggattacaccttaggaaaccccaccccctaactcagggcccaggggaacttcttggaaagagttttgtagaagcaattactttgggggcttcagctccttccagtcacacagcagattaggggtggacacagagttggaaaagagaaaaatcaaataaatgagtgggaattagagggttttttttctttcttttttttttttttttgacatggagtttcgctcttgttgccaaggctggagtgcaatggtgccatctcgactcactgcaacctccacctcccggttcaactgattctcctgcctcgggctcccaaatagctggggattacaggcatgtgccaccaggcccggataattttgtgtatttttagtagagatcgggtttcaccctattagcaaggatggtctcgatctcccgacctcaggtgatccccccgccttggcctcccaaaatgtagagctcttctttaaagtcttgttcaatatattgaaatttttcctgtatcaaaccaggaaccttggaataaagaactctgagtgaatccagtctctaccaagtactggctgcatacagttgggaaagatagcaacaccatcggtactttgttctctttcctacaaaatgggagggatggcaaccaccctatagggttccagagaaaagcaaagggactaaggggtgaggaggtcttcagtacactcaaagcctaatgcaaatgatgggtgtgctcatgcctatgtcagtacacctctcaacaaagagaaagaagaatactccagggccttttaagcacacactggatccttgtcctggacttagagaacaaggcagggtagaggtaagacctgaaaccacagtccccattatgagctcgcctcctaaggacatgctgttgcttccccagaatacacaaagacacagctgacttatgatgccttgatttatttttaaaatttatttctattttattaatttttattttattttgagataagttctgactctgttgcccaggctggagtgtagttgtgtgatcatggctcaatgtagcctctacctcttgggctcaagagatctttctacctcagccacatgacttgctgagaccacaggcatgaaccaccatggctgggtaattttaattttttttttaaattttcgtggagacagtctctaccaagtactggctgcatacattagggaaagataccagggtctggctatgttgctggtcttgaactcctggcctcaagcaatccttccacctcagcctcccaaagtcctgcaatgacaggcactggcctagttatttatgtatttatttattttttttttttaagagaaaggccacaacagaagggctgtgttttcaaccttattaaaaagcaggcaagggacatgaacagacacttttcaaaagaagacatacatgtggccagcaatcatatgaaaaaaaaaaaaaagctaagcatcactaatcattagagaattgcaaatcaaaaccacaatgagataccacctcacatcagtaagaatggctattattaaaaagtcaaaaataacagatgctggagaggctgtggggaaacaggaacatttacacactgttggtggggtgtaaattaattaaactattgtggaaagcactgttgtgattcctcaaagacctaaaaccaactatcatttgatccagcaatcccattgctgggtatataccccaaagaatataaatcattctgttataaagacacatgcacacaaatgtacactgcagcacttttcacgacagcaaagaaacggaatcaacctaagtgtcaatcaatggaagactggataaagaaaatatggtgcttatatgccgtggaatactatgtagccataaaagagaagatcacatcctttgcaggaatatggatggaactggaggccattatccttagctaagtaacacaggaacagaaaaccaaataccacatgttctcacttataagaagaagctaagtgatgagaacatatggacacatagaggggaacaacacacactgaagcctatcagaggatggagggtgggaggagggagaggatcagaaaaaataactagtgggtactagactgaataatctgggtgacggggccgggtgaggtggctcacacctgtaatcccagcactttgggaggccagggcaggcagatcacctgaggtcaggagttcatgaccagcctggccaaaacagtgagactccatctctactaaaaatacaaaaattagctggatgtggtggcacatgcctgtaatcccagctacttatgaggttgaggcaggagaattgcttgaacccgggagctagaggttgcagtgagccaagatggtgccactgcacttcagcctgggccacagagctagactctgtctctaaataaataaataaataaataaaataatctaggtgatggaataagatgtacaacaaacccccatgacacgatttacctatgtaacaaacctgcacttgtacccttgaacttaaaaaaaaaagttaaatagaaaataaataaataaaataaaatctaatggaaaattggataaaaaagaaagagcagtgttttcaacaacactcccccatgttatcacactgagcattgtttccaaattgattatgttctttaatcaaacaccacactagcattcttaaaagcactgagaacaaagcactaaagagttctctgccacagtttggcttttctttcaatgtctaatcaaatctcacatatttcctactgtctccccagaggagttctgggaacttttctttatattctcatcacataacccaccccaagagacaggaagggagaaaggaggatggaagaaacgaaaggagagaggaagggaggaaacaggataaagaaatgcagatgggagaaggttagaatgaaggagccagcatcactggactgaatgtccctgcatccctgatctgttcagtgggacacaggcagccagggaggcagcccaggagcctcagagaccgctggtagtggtgtcctcctcagcacttcttccctgcctcccgcacacctgagggtcaggcccttgcatctaattggacagctgggttggtgaacgtggcctgttctgccagccgcctcgtcggccacagtgacagctgtatcacttccctgatgtgagtgggcgctgagaagcgttgacacatgatcaacttccctctaatatccttcaaccaacctgacagttgtccggcaggggctagtcagctcgcctgccagccctcaccgaggcattgtgggacagcttcctaaggaatacagtcaggagagacttcaaatgaggcctttgttttcccctagtgtgctaactggggaattgattcaaatcctgagggtgatggctatgataggggctgctacatagggcctggaggaatgtaggtaacagcaaatgatagcatttgagagggccactccatcttgctctaagactagctgggtggtctcgtcgatgcaggatgtggttcagaggaagacttctatcagggatttgcagttccatagcaacacacgcttttttttttctattctcacatatctttccatcatgtagtttaaggtggaagaaacactctctcgtaccaggaaaagtttggaagcctcaaagttgtaagcagaaacgtctctgtctttcccgatgacagccacagtctgatggctctatcctgctgagcatcttgtcatcacccctgccaagtctcttagccagggggcccctctctctcgctcacccactagcaggaaggacaaggctaagtggggatccaggaagcatgggttcacttaaggctctgtcgctatgctaagtgaggccagagacatcttgcagcattgatgaagaatctggcatccagtgactgtcattctttcctctggttctgacattctccagatgtccatgagcaggagacgaggacagcagcaaactccagcttaacataagatggagaggctgttgggatttctgagggaccagagatcttttggctgcaactcagaggagggtaagaaaggagggctgttactaccgggatgttggggtggctcaaggaacacattcgccagaatgcagctgggcttcaagaacaacagaggccagacattccaacaccaccagtggcctctgtctcttattcctttttaactctgaatgtttgcttctcagccctactccctgttgttgccatttaatttttctttgtggttaaaacaaaacaagttgccagcaccccctaagcttcaataactacagtgcaacttaaaaagaaaataatggcctctttcactcagtttcacgtttaaggttctcaagaaagcacatgattggctcagcttgattgtgggtcctttgctgagccaataaactgtggccagggattgtgtcatgtggacaaacatggctgctccttgggaagcaggtagatggtgggtggtgagaggcgttcccagaagcacaaagtactgtgctgaggaagccatggctgacccatgctggatggctcctatgcccaaggaggctctataagaaagttcactgatgtcagatcaaacatggaatttgatctatgtaagatttggtttaaggttgtgattgtggttaaaatgtcattttgctcagcctgtgagacataattcagaaacattaccctccaaagaagccagtgagataactaaaaattcagctgacacccatgaagaaggagcagaaatgactctttggggatcattaagcaaacctgtctccagaccagctggggcaaactcagaaggcaagaagccaagttcattctccctgtggtccttgcctgttttccatcctgtcttctgttctccaagtgggcccatggagtcagctggcttccagccccatgagttcccgcaaattgagtagaagccagccctgtggtcaatggctgtggcaagaggcctatggaggcttccatgacatgctaaaaaaaaggctggcttagttagcaaacatggccctggggagaggacttgtggatttgggatctcaccctggctgctccagtgcagagaggaactcatggagaggccggcagaggaagtgagcagagctaatgttcaattacgtgcaggcaagctgtgatcaatgtgcagagaagaggccaggggaccaggctgggagagctgccaaccgcacctgtgaaggaatggtcaggaaccctcccaccctgggatgcattcctggcttttaccagttattcaggttctaaagaagtcacccttgagaactgtttgtgaccacttcaaaattacaagcttcccacaaaagtctgatttatgaacaatctgttagatatttgattcagaacaccttttcggaattaattaatctatctgaagggggggaaaaaggtgttttctttttaaacgtcaagtttctgtcgtggccattttctatgcagaagaaagaatcttttgattaaagtcagaacttctcccaattggggttacccagcacccaaggaagggcatccaatctaagctcttctgatgacgtacttgggcttggcatgtgcctaattaccagacacaggtcctttcatttctgtctgagttctggcacggctgaagaacattaaaacactgctcagagtgtgccttcatcctttctgtgatggggtggccaccaaccagcccgccagcacaggactttgggatggcacatggcagcttgcattcgtctccacgacacactgttgggcactgtcaggggatcagactggtagctgtgcaggaggctgcttgctccgataattaatttcctctccagccagccccttctaccagttgtactacccagaactctgccctagctttgtttgcctgcagctctccctaccatcccacctgccttctccagcctccccgctccaccctggcctatcctccccccaattccctggacgccagccttcagccctggcatgtctcctgtcagtcaccctctgaggcccaggcttctcttcactttcctgaccctacaccggcagacatttcctggtgacagctttgtgattcctctccacatctccaccgtgatgtcctgaaaacacggggctctaaagaggcctgcaggcagacagcaggaaccgagaatcaagcccaggccccttgtcattcagtccgattctgccggccactggcagcccctggtttgaagttggaggttacagtgactgctattcctctctcctcttctccctctctcctccacatccgcactacacagaacaggtctccttgtttatcagcttgaattgggaatgtacatggcacatgccttatctttattatacatgataacacattttccaagatagatgatccgctcttagtcacctcaatacgcacctgctacaaactcccaggctcagattcaataaacatttcctgggcactgagtgagttccttgattcagaggcagtgaccaccatgcggtgcttcagaacaaaggcaccagccacaaagacccaattcaaatctcagctttaccacttcctagccggatgaccttgggcaagtaacttcatctcttagtgtggtgcctggtctgtaaaacagcaataataccccctaggctttctgtaagtgtgaaatgagcaaattcacaaagcatttcaattagggcctggcccattgcaactgctgcctaagcagctattattatttccaataggtaccatgatatctgttttctcattattatgagaatcttgtaaattatgtactactgtctgcatttggtttataaagacaccgaggatggagaagttcagatattttgctcaaatgtgcagtgttaattagcatcaataccagggcttgaacctgggtctggggagaacctggccagctctctttactctggccatgaagtgctgggtactttgcaggtgcatatgtgcttcatcaatatctgtcaaatgttgtgtaatcgtctgttttcattcatattcacaactctgtggacatagagtggttagccattcaggaaagagtgagggtgttctgacctggggacatcaggcttggttcccgggcactggccttccctggaaagaccttctgggaaaactgaaggctagaaagaagcttccccattcaagaaggaaaatcctgcaataagtagccctggagcttgcattccttttaagaaggggtgaagaatcatacgaggcacagcacgcaggagtgtggggtgggaagatggaggtagcaatgcctcagctggccagcacaagaggcatttatgaaaatcaatccaggccaggcgtggtggcttaccctgtaatcccagcgctttgggaggccaaggtggggagatgtcttgaggccaggagttcaggaccagcctgggcaacatagcaagcctctgtctatacaaaaaataaaacaaaattagttgagtgtggtggtgcacacctgtggtcccagctactcaggaggctgaggcaggaggattgcttgaacccaggagttcaagtctgcagtgaaccgtgatcacaccattgcacttcagcctgggtgatagtgcaagaccctgtctcaacagcaacaacaaaaatcaatccacaaatacacattcgaaacttttcctcttctctcccgaaccatggccaccgactagctcaagcctctagcatctgtctagagtgtgctcacttccttacttgcttgcggcgtccgggcctctctgcccaagggcagccaggatgaattctagaaaatgcaaatccaggccaggcatggtggctcacacctgtaatcccagcactttgggaggccgaggcgggcagatcacgaggtcaggagatcgagaccagcctggccaacatggtgaaacctcgtctctactaaaaacacaaaaattagctgggtgtggtggcacatgcccataatcccagctactcaggaggctgaggcacgagaattgcttgaacctaggaggcagaggttgcagtgagctgagatcgcgccactgcactctagcctggtgacagagtgagattctgtctcaaaaaaaaaaaaaaaaaaaaaaggaaaagaaaagaaaatgcaaatccactcatgtcttgctccccagcccggccctccagtgtattcccattggctcatagtgaatcccaccgctttgctcagtctcacccagctctccatttcttgccccgtcatgctctcctggtctctgggctgcagctgtgggcttcctgctggacctgacacctgctccatgaccctctcttgcagcctttgcacctgctcttctctctgcctggagcaccccttatccccaaacccccaaggtggcccttttctccactgtgggttgcagagtacatagcacttgcttaaaaacatccctccggccacctcattctaaagagccttcaagccccgtctcactaccagattcctgcctcactggcattgtcgcatttgtatcaatagttgaaactgtctttagaaaaaaaactacttacatgagctccttgcaggccagaacttgggatttcttgtctatttctggcactcagcaccagaatgggtgaaggtgctccataaacacttgtggatgaatgaatgaaatttcaacccaggctttatgtgcccagtgcttgactgtgttttatggggaacagaaatacaattgtgtctcaaatcctgcccccagagagcttctggttctgagcagatatattcaccagggagtgaatacttcaggacagggagtcaaacatgtatgtcaagaagtcctagagggcagaatgagcggggagtggaattcctgggaatgtcttggggagtgggctgcagatgggtttaaagaatgactgggctgggcacagtggctcatgtctgtaatcccagcgctttgggagtctgaggcaggcagatacttgacatcaggagttcgagaccagcttgatgaagccccgtctttactaaataaataaataaataaataataaaaaataaaattacccaggcatggtgaaacatgcctatagtcccagctattcaggagactgaagcatgagaattgcttgagctcggaagttgcaatgagccaagatctcaccactgcactccagcctgggtgatagagccagactacttctcaaaaaaaaaaaagaatgatggcactgagagacaaagggaggaacaggttaggcttcccagcaggagaacgaccacagcaaaggcctgggtaggggtggcaggggccaaagagaggacatcgtagagattgcctttgaatagaggaggcagctgttccattgatgctgagtaaatgctttgcatatactttctagtttctcctgctgtttccctgagttagttccatcaacctgtgatggaatgcacaatatcttgatgtcattcttttttttttttttttttttttttttttagagtagggtcttgctctgtcacccaggctagagtgcagtggcaccatcattgcttactgcaggctcaacctcttgggctcaagtgatcctcccacctcaccctcccgagtagctgggactacaggtgcacaaccatgcccagctaatttgtgtatttttagtagatatggggtctcactgtgttgcccaggctggacctcatggcctcaagcaatcctcccattttggcttctcaaagtgctggcattacaggcataagccaccacaccaagctcctgattttcattcttatatctctcagagatttttagtgtcacttgccagagggcaccagggccagagtctaatgcccagtactcaatggtgaacatttttgctgtgccaagagagaaccactcgattagaggtggctactgcaggctttggaagttttctacggtgggaaccaacaatccgtgatccgccatggtccagtgcatgcagccttggcttctcttccctggacctgggaagcctgcagatgctggaagcagcccagctgtggcccctccactgttcttgccccttatgtgtgggtgtggaaagaactctcattcagagacatggtgattttgggatggagacgttgcttcctccaaccagactgcttccttcagtttccactgcctgggctcatgcatcagtaagttctcctactagaaagtttatttgcaaaaagccatggccatttgctcacaaagctgtgcccacttttgtctgtgtcttttgcccatttttttttttttttttttttgccaaatgtagggtttaaaataaaattcccgtgttacttccctgtaactgtcataacaaattccatgcacttggtggctagagacaacataaatgtgttctcccacaggtttgggaactggaagtcagaaatcaggagttcgagaccagcctggtgaagccccatctttaccaaaaaaaaaaaaaaaaagaaagaaagaaaataccaaaaatgagccaatgtctacagggcttcgctccctctagaggcttcaggggaggacacttccttgactcttccagctcctggtggcttccatgttccctggcttgtgactgcagagttccaacctctgcctccgtctttgccgggccttctcctcttctcccacggaggcagagaagcgtgtcctctcctcttcagtctcttacagggacacttgtcattggatttaggatccacctggatattccagaatggtctcatcttgagatccttaactttaaagcacctgcaaagactctttaacaaagaagttacatttgcaagttctggaacatgctcatatctttttggaggccactactaaaccccctacaattctctttacataatttcccaaaactgtttcccaaaaagttgccagcagtaaccaaattccagaagtgaaagcatgaccctggcccatggtgacaaacccgctttctaccaagttgatcaccacctaactgttgattctagcccttctaatctttagcctgtggtagcaagccaggtacaatttggcattaagatctaagaatggccaaagtctctcattgcacgcagtgctaccctgatgcagtggaaactacactaaacaagctccgtgggatccttgggccttctcccgtctccatgactcattggctgggagactttggaaaattttctctgcttctgtgaacttcagtctccctatctataaaatgaagactagattagaacaggggttgatatgctatagcttttttttttttttggagatggagtctcgctctgtcacccaggctagagtgcaaatagcacaatctcggctcactagaacctccacctcccgggttcaagtgattctcctgcctcagcctcctgagtagctgagattgcagatgcctgccaccacacccggctaatttttgtatttttaatagagatgggttttcaccatgttggccaggctggtcttgaactcctgacctcaggtgatccacctgcctcggcctcccaaagtgctgggattacaggcgtgagccactgtgcctggccagcctgcttttttaaataaagttttattggaacccagccttgtccatttatttacagatcgtgtatgggggctgtcatgctgcaagagcaaagcggttgcaacagagacagaatgactcagaaaatggagaatatttgctggctagccctttacagaaaaagcttgccaccccctagacaagtacagagctctgtaaagggcccttctagctgggttattttgtgttactatggaccagttcctcatttgagccctgcctaaaatctgatggtggcctgaggagctggctatggagagggagcaggactgaaaaaaaggctccatcagcctcacagtaccagcattgcccctccccggacatccttgtgtgcaccgtgcttccgcattgcctgcgctcccagaatttagctcccccagatcttccaccctgttctccccttggggcttgccccctgcaacgggcaggaaatgcagacagccaggggacttgtgggtccctttaaggccttgagacctggggaaatcccccagttctcagccacctaaggacaactcattctcccagtctaagggccgagtcattctcactttgcttctatcactgtccagattccagcaaaatacacccttccacagtcaaacctctacctccttcattctcctctcttatttgttaaacaaatcctgatctgcctttttaggctgctcttgaattttatggcaacatataataaacatctgactgcttttatttctatttaacttttatcttgaatgtctctgctgtttcaaaccaaatatttacagcatcacacagccgctgcaatttcattcctcaccaatactgtcactccctcctgcttgcactcaccagccccgtagagaggccgggaatgttggggcgaatggtctcttgtgcccccacagcagggcttccagactggatctctgagtcactggactcccgggagagcagatggctttcctggcagcctggccctcagctcggagtcaggccatctctggtgactgaagggctttctgtacttggtgtcttcacacatcggtactaggttgggtctggctgtgagaaagaccctcgcatgctccattaaggagcaaacctggggaattcgagcacctctgtcttctcaaaggcctctctttttctcagtaccctcaggtttggcccaaggcctcggagtgcagctccttggtccacctgtgcttgtccctgcttttctggcccaccaaaaagtgctcctgacagccctaaccacctactcttcaccaaggctctctggtcctgtgtggtccaaaaggccgactgcagatgctcttttgagtccagggccctaaagaaagcagtcctacctggtgggggatgacactctggacctggagtctgaagacctcgttttctgtctctgagcttcagttttctcatctatgaaatgggaatcataacacacgcttgatgtgactctcagggctgccctaaggatactgaaaaatggcgaatgacggcgtgctttgtacacagtgggtcgtccaaggggagccagagagtgcctctttctggcatgcctgagcctccggagctggagaagcctcctttggtctcctagactgccttttctcctcccatctgtctcaacctgcacaaatcctgccgggctctgcacattgctctgtgttgacggatccaccatattagccttgcctggccctttccttcgtccttagaagactcatgactccagctgagcttatgggtgaactctttcacagcagaaactgctttgcccttccttccccatgggccttgtacctggtcaagcctgcatctttcagctctctggtcatccagagggaagtctcacatgagtcttggtgagaatcttcaacttggccgtgcaagttttctgatactttcaatccagttcaagataagatacatacagcagtcacacaccctgaatctcagattctcagaggtaagataacctccccgacatgtcccacccatggggtagctctttccaaccccactagaaagtcattgttatgtagactcgatgttactgtactccccaaattcatatgctgaaaccctaactcactgtggtggtgtactagtctgttttcatgccactaataaggacatacccgagactgggtaatttataaagaaaacgagatataatgaactcacagttccatgtggctggggaggcctcacaatcatggtggaaggggaaaagcatgtctcacatggtggcaggcaagacagaatgagagccaaatgaaaggggtttccccttataaaaccgtcagatctcctgggacttcttcactaccatgaaaacagtatgggggaaaccacccccatgattcaattatctcccactgggcccctcccacaacacatgggaattatgggagctacaattcaagatgagatttgggtggggacacagcaaaaccatatcagatggtattagaaaatggggcctttgggagatgattaggtcatgagcatggagccctcattaatgggattagtgtccttagaagagaccctcagagcttttttgctgtcttcccaccaaatgaggatgtaacgagaaatggacagtatacaaaccggaaaatggccctcgccaggacctgaccatgctgccaccctggtcttggacttcagccttcagaactgtaagaaataagtttatggtactgcgttattgcacccccaatgaactaagacaacccacaccctggcttgtctcaggacaactctgaaggccactccatctctagagctccctacagctttggcttagaccttcttgagactacactgcagcccaactcctccctcagctcagcccgcctccttcctttccctacagtgttgatcacaagaacattcccgtctaaacattctgcacaataatctccatctcagagcctgcttcatggggatcccaacccatgtgacggtagccaactgtccttctttgtgcaggagtcctttattctgagagtacatcctagctacctttagggtgtgaaaatggtctttctgctatgaaatggtggcacaatcagatgcgtgtttgtgttatttttccctgtattttacttagcaccaggggccactggccacctgagggtggtcccctggtttcctttgatggtgtgccaggatgtcagatttaaaaatccaaggaccaccacagcttctcagtcggttctctgtctcaagagcaaccagatgaagtccacacacgtgatgccccgctgccttctcagataaactgtgggtcacatccaatttcagaatctagtggcaagtgcatcacatgccctctcaagaaggcatttccagtgggtgtctgctgtttctttttcacctctcctgtattcactctactttcttttggagagaatgctgcaatttttggggggccccactccttacctgctttcagtccctgtgtttgggaggaacgtgccttcctcttctcccgacagcagagtggtgatgtgggcgtgcaacccatcacagcatttcatcccctaaggcacagtgatcgggttcagagatacatatgtcattgggacaggtcaacgacagtgcaaccagggattttgttggcactgttgaaaataagaaacccatgccttcatctgttttgtgctgctataacagtatatgagggactgggtaatttataaagaacagaaatttatttctcacagttctggagactgggaagtccaagatcaaggcaccagcatctgctgagggtcatcttactgcatcctcacatggcagaagagcggaagagtgaacccactctgcaagccctttggataaaggccctaatcaatttgtgagggaggagccctcatggcctaatcacctcatgaagaccccacttctcaacactatcacattggaaacatcagaattttagagggaacacattcaaaccatagccaccctctgtccagtatgagtgctaactgtgagaacagggtaaggccagagctggccatgaaaccaaagcagagatcagaaccaagagacgaagaaagtgggagactgatctctgttaattttgctttagtatcaacctccagcgccataccagaagccatgcatgccattgtactttccacttatgtcagctgatacatttccttttcttcccttgagtcaattgacttaagtttttgtcacttgcatatgaaagagtcctaatggttatggaattggagaatgtacaagctaaaaggaacttggatttgctccaatattaaatatgaaatgagatcatctgtacacactgaaacttatagcaaagctgacaaccctaagtcacaattgagagccatcctttctggacaaggaggtccattcattactgcttaggccttcctgactcactgggtcacagtttctaccaccattggtctacatttctaagcccagcccttgataattgttagcctagaaaacagggtcagaaaacacagcccactggccaaatcagatctgccacgtgttttgagatggcctatgagctaagaatgtttttttttacattttacgatggttgagaggaaaaaaaaaaaaagaagttcaatattttatagcatgtaaaaattacattaaattcacatgtcagtgcccatacataaagttttattggaacacgaccatgctcatttgtttatgtatttatggctccaaacagcagagttgagcagttgtgatggagactgtacagcctacaaagtctaaaatatttactatttggctctttacaggaaaagtttactgactagtgctgaaagtctctggagatgtgaccttcacagtttggtatctagctttgagaccccgtatcaccaacaatgaaaagcacttcccttgaaataatttacatagttacccaagatttagacagcagacatctcaggatgtagaggatttttttcagattgtttccaggacctagctttgagccaaacatacagtattcctgcaataagtctttgctgtgtaaaaacaaaaatcgaatgttaaattaggccactgacccttttaagcccaaagcataaataaatacagaaaatgtgaatttgccattattattatttttatttttttgagacaaaggctcactctgtcgcctaggatggagtgcagtgacgtaattttggttcatcgcaacctccacctcctgggttcaagcgattctcttgcctcagcctcctgagtagctgggactacaggcacatgccaccacaccggccatatatacataatattatatattattatatatactatagaatatataattatatatatagtataatatataataatatataatattaataatatattatatattataaacaaatatatatttaaatataaatttatatatgttatatatatataaatatatatatttagtagagatgggggtttccccatgttggccaggctggtctcaaactcttgacctcaggtgatccacctgccttagcctcccaaagtgctgggattacaagtgtgagccacttcgcccagctgatttttaaagaagatctatccaggtcttcttggagcagaattatgtaggcatccaggaatgcgagttgtgctgccaagtgacatttctcttcatgttttccctccctggcagagtcgccacttgatttaggatctgacaccatgggtagatattggaattccagtcttagcctgcaagtcacacaatgtctttgagcttcagcttccaagcctgcaagatggggcgataagagtttacctcctgggagttaagaggattaaataagttaacagttaagtaaaagtactctgaaatgttagcttttattttcatccttccctccttgtgtaagaaaataatgtaaatagcctttattgctcttagtttttcttgtaaaagctgtgggaaggtgaaataacctcattgaaatagagccattcataagtagggtagatcattaaccgctatgagatagatgattatattccatcaggttccaagccgacagcacccattttacagtttggaactgtgaagtatttgtactgtgtgatccacagctcttaaactttccaagacttagtcagtccttaggttccagacaaactttcatcccacctacacccccaacctactctcatcagggttcccaatgactgccatattgccaaatctaatgatcacttctctgcctgtatcttactccgtctctcaacagtatttgaaagaattgatgatgccctccttaaagctcattctcatgtggcttagaggacagacctagcctcctacaccactggtcaatcctgaacttcctttgctgcttcttcctttttctcctaccaaccttttatttttgttttaatttaatttacttttttttttttaagaggcagggtctcactctgtcacccaggctgaagtgcagtggggtgatcacggctcgctgcagcctcgaactcctgggctcaagcaatcatattgcctcatcctcctgagtagctgggactatagcaacataccaccatgtttgactgtttttttaatttttattttagtggagatggggtcttgctatgttgcctatgttggtctcaagcttctggcctcaagtgatcctcctgcctcagcctcccaaagtcctaggattatagtatggacaactgaacctagcctcttcccaacctcttaatactacagggccacagggcactcttgtcttttcttcttctatatgcatattctaagtcacctcatatcactccataatgttcatgtactggctacttgcaaatttcctgcccaacttcaagctttcttctaaatatcagatcctgatgaccgactacctctttggacatctcttaggcatctgagccttgccatatataaaacctaactcttgttttcttttctcaaacctgatctttcctcagtcttccccatcttagcaaatgatccttgatgtgggcttaggggaaaaagaagaaccaaggatgatcaaagcttttagcctgagcaacctagaatgttcacatgtgatgctcttttcctaggccctgtcattaccccccattagatgaaggtgcaaatgtggatatgcatacacagaggaacatagactgtatatagatttgttattatccctccatctcccctacaaggaagtgaactccctgagagcaggacatttatgtcaggtcctgagaaaccacagtgaacaaaatggactggcacatagtaagagctcctcaaatatgccttgaatgactccctgaccttgtagaacaaaaatgcttcctgggtctacagaatgagaataggccacaagagaagcgggaatgaaacttggaaactcaagcatgagtgcatttttaagacgagagtgcatttttaagacacatctctgggctgaggcaacgcatttacacacatgtactgtttttactgaattctgaaccagagagctagatggatagatgatagataattaaattggttccaatgacagagagctaaatggatgtttgtttttatcatgccaaatgatcatgcttattttctgaaattttcacttcacaactgcttgttttggtgtcaggtagatacatttaagttatcaaaacttgcctgggaggagtgagaaaagagtgtgcttcttgtctctgctatcagcaaatataagcccaccaggtgacaagtccctgccaagttccaggacagcatggggagctgtgtatgatgcactcatggagtctaaaatcaggtgggcatccaggttggaaagaaagaagtagaactgtctttattcaacagatgataagatcactgatatagtaaatctgatgaaatcaacaaaaagctaatagaactaataggtaaattttgcaagaatgcagaacacaagactgacataaaaaaagaattgcatttctatatattagcaatgaacaatcaaaactcattattttaaacatatcttccacaatagcatcaaaaacataaaatacttaggagtaaatctgacaaaagatgtgaaagacatgcacacggacaacaaaatattgtgagatacgtgaaaggagccctgaataaatggaaatatacagaccttgttcacaggttgaaaaactcaatgttaataagatgtaaattctcccaagttgatttaatcctatctcaatcaaaatcttagcatgctatgtgtagaaattgaaagctgattctgaaattcttatagaaatacgaaagacctggaatagccaaaacaactccaaaaaagaaatgaaagctggaaagtggatcttacctgattttaataatgattataaagctacagtaatccaaacaacatgatattgtcataaaggtaaacaaatagatgaacagaacagaatagagagttcagaaataaagctatgcacatatagacaactaacttttacaaagcaccaaaagcaatgcactgaaggaagaatagttttttcaacaaattaagttggaacaattcatttgtattcaactgtatacaattgtatattcatatacaaaaaaatacatttgaatccatacctcatatcagatgccaaattaatgtaaaatgcaaaactataacatttccaaaacacatagaagaaaaactttgtccttagattaagcctaaaggtctttcatacaacagcaaagcacaatccacagagcaaactgatgacttagagctcttagaaatttttgtttttcaaaacatgcactgttaagagaatgaaaagacaagccacaggttaatagaaaatttctgcaagacatgtatctgataaaagacttgtattcaaaatgtataaacaattttcaaaactttacaataaaaaaacaaacaacccattaaaaatagacaaaatatttgaacagacatttcactagagaggacacatagatggccaataggcacatgaaaagatgctcaacatcattagtcattagagacatgcacagcaaagccaggagatactacttcacacccatcagaatgactaaaataaacaaagactgagcatacccaagctgtggagaaaccggaactctcatacactcatggcagaaatgtaaaatattcacccacttggcaaaacagcttggcagtttcttaagaaattaagcatacctctgccatatgatccagctgttccacctgtaggcattatcagccaagaggaaatacaagtccatgcaaagatgtatacatgaacgtgcatggcagcttcatctataacagccccatattggaagcaattcaaatgtccaccaacagatgaatgaataaacaaattacagtaaatctgtacaatggaatgctactcagaaataaagaagaatgaactattgaaatatgcaacaacatgaatgactcttaaaataattatgctgaatgaaagaagctataccaaaggaaggacatactgtatattctgtttatataaaattctagaaaattcacacgaatctagtgataggatcattggttgcctggggatgagggattggggaggactgggagggagggattatgaaggggcatgaggaaacttctggaggtaacgatatgtttatttattgattgtggtggtttcacggatgcatatgtcaaaacttatcaaatcatatatcttaaatatgtatagttattgtaagccaattgtaacttaataaatttgcacttttaaaaaatccaagccagacatggtggtctgcctgtagttacagctactcaggaggctgaggcagaatgattgcttgagctcaggagataaggctgcagtgagcttggattgcaccaccacactcaagcctgagcaacagagcaagatcctgactctaaaaaagaaaaaaagtcttatgggaaaaaaaatcaatttcctggtaaagaatgccaactgctgggaagaaaacaagatctggagcaaggtgagcgtttagcagtggatgctgcgtagacctcaggtgatgcccaaggaaagtcaggcgatatttgaatagaactgaaaagtgtttactgtgtgaaaagctggggaagaggggaggaggtgagaaagaaagagaagggtgaagacctttcctgaaggagggagcagcttgtaggaaggctttgaggtcaggtggagtgtgttcctatcaggacttcagcacagaaggtacacagtgatgtgtatcaacttgattgggctaagtgatgcccacatagctgataacatattacttctgggtgtgtctgtgagggtgtttctaaagagactggcatttgaaccaataggctaagttaagtagatttgcattgaccaatgtgagctgtcaccatccaatccattgagggtcagaatagaacaaaaaggtggaggacgggtggattctctcccttctccagctgggacgtccatcgtcttctcctgctttgtacatctgatgtactagcttcccctgatgcttgcacatcagagctcctggttctcaggccttctggtttcaggacttacagtatcagctctcctggttctcaggcctttggacttggactgaattacactggctttctgggacctccagcttgcagacagcaggtggtgggacttcttggcctccagaatcatgtgagctgattcccataataaatcccctcttaatctatctgtctgtctgtctgtctatctatctatctatctatctacctatctatctatctattatctatctatctttatttatttctatttacctgtctgtctatctgtgaataccattccttctgtttctccaaagagccctgaccagtatagaagctgtgatggataacacttaactcactttactcaacttttttttttcttttcaaaaaagagagctttgggagataaatggttcaaattgttcacgctccaaacctgcaggtttttccaccatcagaaggatgaccataaactcacagttctggactcccttaggccaccaaactccccctgacttgagcaggcttgtcctccagcctgaacaaccccggggcccagtcacatctgctgagtggctgctctgtggaggcagcatgactggcccgatgggtacagacacagccactggcacaaggcccaccttgctctgctctgttcagtggcctcagaacactgcttaagctctctggacctcagggtcctacctgtagacagttcctttgggagaagaccatgacagcaggtctttgggaaagataaaattgtgtgtaactgcaaagggtgttcaccaaaggactttgtctccaggtgtggccaaccgctgtagagactctgggaccccacccagagtcccttgccagctagtgtgtgcacccatgagggtaggctgctaaaatctcactcctgcaccctcctctggaggactgccctcctccttacttacaaatgctgggatgatatgccctccctaaggaggggtccccatccaatgactaactagtggagagtggcaatggtcagaccacttgccttaaggaaggatggctctgtggtgtcattcaggtaccagaactccctgtggaatcagctgaggccagactccagctaggtccacagcttggcctggcttctttcccacccctcctttgcttcctgaacaacctcacattctccctgcgagcacccccttgatcaatcaaggcaccagcgttctagacactctgattctggagaaccctaacagagacttctgagacctcaacactctgagatttttttcttttttcttttttttttttcaaacagggtctcactctgtctcaggctagagtgcagtggtacagtcatggcactgtagcatcaaactcctggacttaagtaatttgcccacctcagactcccaaagcactaagattacaggcgtgagccaccgtgctggccccactcagagattattaacggcaggtgtaacatctttgccataagccatcccacctctgccccacatggagggtcccactgtctcccttcccagacctgccttggaacactgaggagcctagggcccaggacctgactcactcctggatgttttgttcacactcttttcaaaaaacacattctcaatagctttaatttaatcaaaacattcttgactaagatcattaaagcctctgagagaggcatttaattctaaattcaccatatccacggcatagcagttgagtaactgaaaaatcaactttatgtcataatagtttgttagaacgtttgtttactcttcatctgagacatgctaattaaaacaagaggccttcacaagcaatccagttagcaaacaggattggttaatagataaggaatggttgttaattacagggaagcccctccctgcccacatggattgggttgttcaatggggtccacggaatgcaacctttggttcatctcttccctcatcgaagacacttaggaacatctctgagaaacacttaccttggtcgggtctcgcctgtcaccagatctttctgaattcatcttgaagggaagtgattcaggacccttgtggatttctgtttccctagggcggagctattcccactctcccaccaccttgcctgttagcatgtggtcctaactcctgctgcactggctcctcacgcaggataaggagctgttgcagaaagtcccctgctaacaactggccctctgactgctgtaggagacctggccagccctactaccttcccacagacacacccccacatgttccagaagccagtcaatgggggcagggggcatgctccttactatgagttcaggaacatctccaaacatagacaccaaggggcccaggatgcatttgttaagtttcaaagtatcaaaccccttacccttccaacacggtttccactctgtctggcctttttctgcctttctgcataattgcactttcacggacaatttttcatctgcttccctccctcacaagtctaagaccaatcacccaatatcctgctttagtcctgcccagcaacctctccttctggcatattcccctcccttcagagccctgggtattcatgcacatccggccctcagccaggacatatactccctgctctccccagcccccaactcaggaacagggctcctaaccttcccgtagactccaagatgttagaatgaaaagacatcttacagacctcattttaaagtaaagaaactgaggcagagaggcagtgatggaggcgttgtcatatttctggttggaaggcgcaacccaaggccacgttgctatttttaatgtctaatccacattacaatgtacataagtcatgagctgattccaaccgtgttactcatttttgtcatccctgtgttgagttagttctcttatgcagagtttcagccttccagaagctaaaagactaatacagggagctgtcatgacaacgacaccatggtagcacttaatgaaaacttgagttatggaaatataaaatactgaaataaaaatattaataaagcctcgcttttatgtggaatttggaaatatgtgaacagcaaaaattttatcactatgaacacattagtcttgaattaggtgcattttgtattgaggacttgaagaaggtctcctcattgtgatgactgaggtggacggggactccaaaggctctttaagctttgaagagcacagatggcatcatttgtgcctgcagtctcccgcaggcctggcacaaagaataggtgtctggtaggtgttggacaaggaaggggtaaaggaatggatgttcctactctgaggccctgcagcctccagtcccagagctcgctttgggcagagccctgcagcagagaactcctgtaactgtggggacctcttctggaggggctggcgtctcaagggtgattggcttcctggcagcaaacacaggctccatgctggagtgtttgaaggtctacgtatcaaaagggaggaaatgattaatcatatgtagccagcctgctgagaggagggctaggaaaaccaggatgggaatcagaaagaagcgtcctcctggccaaggacgtttcctgccttcttacctccattagaggcactttcttctccgacctcagtcttttctgtgcaggaaatcctggcctttttagctgctgtaagcctttgcttgctactggtctcaggaagctgtcctggactgatgtctgaaggcaactgccacttcattctcactagtactttctgagcgctgaatacatctcaggctctgccctaagcacttctttaattctcccgataaccacatgagggaagtgccattatttctttttcccaagtgaggaaactgaggttctgagaggctaagggttggaactcacagctcttctctaagcaatggagatgactttggaaaccatttgactacaaaccatttacaccgtcttcccctcccagcctccgcccaggttgccagcctcacattgttgtggttcccctagtttcctcaaaagtcaggcagcccagcctgggggagatctcaggaaactccaagatcagcttctacatgactggaggccacagctgctaccaccactcaagcctggcagcaccaacgccaggccttggtgatggatgtgtgggccctggccatctgcctggcaccaaccagactcccaaatgccccagggattcagagtgtgccaggaatcccccaggccatgcctgtgctagtttctgcacctttgctcacttgatctcctctgcctggagcttctctttccttctctagcccaatccaaccccttttccatggtcggatccaatccccacatccccaactcttgggagtcctgctggcttcttccttcctcatgttccctgttggggtttggtgactcacataaatgttgtaaatgtgcatgatataaataaggaaaacagacctgtaataatcctaccggaactatgagggtcaatggtataggaggtccagactttacaagaactctcccattttgacgtaaattaatttcaacttataaaacactgtctatataaaagaaagtccatctttgggttaaatctgagctatgaaccaccagtttgcaactgtgtccaagagtatgtgtggtgtgtatcatcagagccagtattcaaatctgaatggcccagcgtgagtccctcaacttcctaatatgagtgactcgatttccccacaaggaaactcccgcctcctttccaaagatgaggaagttatgttgatcacattttccttgatcctctcactatcaggaacctccaaaccaaaactgagctaggtcacagaaattattttacccttcattttctcttttgttcttctatttttatgttttgtgctttcattatatttctgtggcaaactattggagaaatttcatgaaagatgtagggaagaattaaacacatgaattaagtaggtttcagggggatgtctccaaaccctaggaggtcaggaaacatttcctttcctgtcttaaccctgacctttttccaggtccagctgggcacgtgtattgctcagggttcattgtttgcaagttgcagaaagcaactcgggctggcattatcacagggggatttttttagaagaagatggagtaagtcagaaaatgtaaagcaaaaacaaaagaagaaaaagaaccagtcggggaaggatctgaaagcagagccatggcgggctgcattggactctgactccagttgcaacctgggattgatggattccaactccgctgcctgctgatcgggactcaaattcagagaagttggtattgcttggataacatttcctctctttatcagcctcgccaagacccttagaaaaagggagcctgaattccccggaggaaaatctgggcgaaatatagggaaagaatggatgtactaaatggatctcgttgaagtgtattgaactgagccaggcctggtagcgtaggagaatctagtgtgggaacgttcattcaattcatttctctatttcttgtggatccaatgggagccatcatggcaggatgaatcatgaccccagaaaggagccttcacttaggaagttggataaagaagaaagtggggtttcccagagcttccttcatgggtctgaaatggagcaggcctacctgagcctcagagtggctgccaccccctgcaaagcaaccataaatgccaccttctgtcctgtcctggactatacagttctgggcatgctcagtatcttgccacagggctcagcccacgcgacagtgctccagcatactcttctcatcccctgggttgccaacgtttaaggactccacaggtattgaggtgtaggggttaagaactcacatcgagagctgtcaagcccaggatctgagctctgtcttctccagttgtcaggttttaaaccggtctgattgcttcttttaaaacttccaatttctcatctgtgaaatgtggataataatgctgacctcataaaggtcgtcaggaggatatgaagatgttgaataagattatcttattccacaagtggctcctaagcaactactccatgctaccctcttaccaacctcgggggttgcagcaggaaaaggacagacaacatgctgccttcctggagagagacggcaatcacacaaataaatgcacatattatttcaaataatagtaagtacagtgaggaaaagtcaatagggcattgcagagatggagacccatcttcagcaaggagggactcgctgcccaactgcagggaaagtggttagctgcagagcagagctgccttgacaagggtctcatccttcctggggcagcctccatctgagaactaagtaaggtgcctgtaaacgtctggccattttggctcacggcgggatacgctgatgagtgattcttactcccaagccacccacgtcagttgcatttcttcctctgcacaatgtttctaccctcttccctacacaggggttgatccctctgaaacatcttgcaaccaaaactccatcttggcgtctgcttccttctgaagaactcaacctgggacacagtaagaggacagatcacctacctgtgaggacccctgtgattcaggtgggtggtcagggaaaaactctgcagaggtagcatgtaagcagaacccagaagcaagggcaggagcaacaagaccctgtgggggagactggtgcacagaggagccaagaaatactgcaaagatcgtggagaaggagacaggcaaggcccgtgtggtctggtgggagtagtaggagatgaggtcagaaaaggaagaggtgatcatatgatgctgtgaggtcataaaaattgctgctggcttttactagaagtgaaatgggaagtcacatgaattttgagctagcaagtgatgtcttatgtttcaaatggtgaattctggctgctgggtggacaatggcgtgagaggagaggagaagcagagtagtagtgtagaagggtgttttggtggtctagggcaagagatgaccacagttacctgttatatggcaatcgtagcagctgtggttgtaatatagtagtattgtggtaatactaatagtagttgtcactgtagtcgtggttgctaggtcaagagcagggagttttcttcaccccacagcactgggcttgccatgcagtatttgcaagcagctcctctgttcacggtccatctgcataaggcctcccatggtgcagtgagtgtgtgaggccagacctttagagatcacagcctcaagttttgtttgtctcattctggctatgcgagaacatgctgcacccaaatatgcaatttgcaaattctggcctaggtttgctgctgttcatttcattttccagaaagtttttacatccctttcagctgctgtatggttttcctgtgtggaggactggtcagagtatgttttcttccattcagcggctgtaaatcccaccctggatgtggcctggggaggctggacctctgcctctctgcacctcctctttggaccattccctttcccttggatttctctttggtcacaggaggtacgataggtcgctggccttctgcaaccccactcaggagagggatcctgaggccccggcttcagagaaaattccataatcaactagactgagtgatgtgtttaggaggccaaggctgatactaactataattcacattccccgggcactctgctccgtaataaagcctggatgtcagatagcccggccaagagctaacatacctgtttgaactagtcttgtgccaatagaaacacgtcagagaagaaaaacatttagccaactgtctgatgcaaatgggttcttttcagccaaatgaagaaggattgcctagacaggggcatatgggtatgttaaatgttaatacataataaagcatcacacctctttcctttggtgttcacaaggtaacgtcccataaataaatagagtgacgagcttttagaccctccctgagccacccaaagccagaaggaaactgggtgggccccttctccatcatgctaccacacggggtacccactccaggatgtttatgcacccggtgtcagaatataaaaatgtttagccctttccgtgtggaattaagaggtatgaatttgtaagtgactctgtttaatcaaaacctccattgaaacaccatttagcccaaaccctatcagtgaatttcaaaatacagattttgctggtaaaatagccccgtgttgccgtttcctcgtcaaatatgtatttagccccccgagaatcctttttactaagccggcagctccagcatgcacaatggtttaatcgtatattgttctctgagtaccaaccctttacaaatcatatgacataaaaagaaaaataagtaacattgtaaagacagtaatgagaactgttgagctaaagtgcctcttaaagaaatcctaataaattccagaatttctagtcttctggcaagctttccatttagaacaaaatcaatgatcaatggctgcaacgagccagcattaggcttgcatgcctctggagcagggaaaactcatagacgaaagatgacatttaaggaaaaaaagctgacattgagtccatcactgtcatcgcttctgccataaagcagcttcaaatattaaaacatttttcatctgtgctgcattattggcaccagaaattgttttctctctgtctggtgcgcacttgaactgcagcagcgctccccggagactccggattgttactaaggcctcataacatattggcagttgacgtggtggtgttcatgtacacttgccactcacacggagcctcccctcccccggcctgcacgccaagccggctgcaaggggacctgggctctgtggctcaaatgcgggggacagcgggtaggcacatgcatgctctgtgatttcttttttgcagtctgcctttccctggccacgaccccatccttgcccctgtctgatgtccaagctgcccctgctgagacagacctggcctcttctggacagctccagtcacataaggactccatagcttgtgtgggctcagagcactttggctgcagagaggaaagtctttaccactgggcaggtagaagctgcttttccttttgtactcctggacctagcactctgctttatgggcactgtggcccctgggctctgttttatgattcagagaaataaggatgtctcagcttctgttcctgtccttacaggactcactagttcgtgatgaagatggtgacacgcccacctggagagatgtacacggtttccttggaggaagcccacggcctggagtgaatcactcaagcagagtgttcgctgggtgactggtgtcccatgagggcaccaggcggatcacattgaatataaaagatgctccttgggggccctcttagctcttgccacatggaaccctgagaagggcagggcaccttgggctggaaggaagatgctgtcagggcgtgcacttgtagaagaggagaggcgccaccaggcaattcctgggattgcatggtttgctgagagaattggggccggggacctcgggagccgtcacgcttgtgtggtcctagacattctcaatcactcccaccctcgccctaaaacttagtcgggatgcccttttctctctacgtggggaccctgctctagggaagaagctgtagggggctggtgtggccgggctgtttctgcctgtctgcatcttacattttacttctggcaggcacttttcccagggactggaacttcagcctcactccctaaattctcaattctcccagaatccccagcaaccaaccaaggggagctccaggggctgagggtcagtgaggcacaaatggcaggtggatggcaggattcctgggtgtcccaacccacaccgcacccatgtggcccttgggtctcagcacctgcataccctggccagcgtggggccagtgtgggaccagcatggggccagtgggaacacagcagcaggcccagtgcttactccaacctcaggactgggcctggggagtggcaggttggactcctccaggaggcacagcacctagaacccatggtgctttcagggcattgaataaaaaatgttttcatccaattaaaacaggaagaggccaggcccaaaggcctgtaatctcagcattctgagaggccaagacaggaggattgcttgaggccaggagctcaagatcagcctgggcaatatagggagacctcatctttaccaataaataaataaataaataaaatgggaagaaaaaaataaatttttagaatcaaagatgtggtttgtcattacatccatgtggttgtaaaatacaagtttgagtttttgtttttcggaggaggaagaggctcacaaagactaaagtgcttagggccttgtaagagggggcacatggccagggctcagtggttggggtaggggtctctggagcctggaggtggcctcagagctaagggacaggtgcccccatgaaacaccccaagcttaatttgactccaggccactgtggcttctgaactgatgcctgggctctcggcatagaaagggggactatgagagggagatctggggtccctgtccctcctctggtcactcatttcactcagtgggtgggtgggggtttaagggaaggaggaagttctattctgcagaccctccaagtactgtgcacacatctcctggatgctgggtcacccagccctgaattctggggagctgctgtccagtaaagagatataagcagtccataaaagactgcagtccagggggaaatgaaatggatacatcagagggactggggtgaacctgctggaggctggagtgatggggtgatctgcaaggaggggccagagcaacttatgaacccaggcatccccgactgccacgcctgtcctccttcccaacacaggaagtctttgtgagttcgtctgcttgagcctttgctctggcctctcccccttggtcagatggcccctcgaaggcctccgccctctcaaagagcccttcctctaagcccatctcaatgccccccacttaaagagtgccccattatctctagcagggtcactgggattggttctaccaccaatacactggcaatcattttctgatctcttaaatagaacacacagtccccagtcccaagtggctggtatacagtgggtgcttaatacacaacagcaatcttgaggaagcttttagaaattagcagatgtagaccttcatactgagctactttctaacaacttcttaaggattattttttatttattattcttagagacagggtctcactctattgcccagatgagtgcagtggtgcaatcgtggctcacttcagccttgacctcctgagctcaagccatccttctgcctcagccttgtgaggagctagaactatggctatgtgccaccacgcccagctaattttgtttgtttgtgtagaggtgggtgtctcttttatgttgcccaggttggtcttgaactcctggcctcaagcaatcttccctccccgatctcccaaagtgctaggattacaggcacaagccatggtgcctggctggagctacgttttaagtcactttgcagggaccctctctgccctgcctgctcttggaagagtgagcaaggggcttctccccacccccagggccaccttacattttatttattgagagcacttttccctgggaccaaaacttcagcatcactccctaaactcctgactgtcccagaatccccatccagcaccctaggagcaatccaggagctcagaattcactgttatcccggtagagtgtgcatctttgcctgtcaaggtacgccccaactccaaggtctgccacgcacccccacccccagagcagagccacagccggcagggtgggaggtgcagggaggaggagctccttttccatctacttcggccaacacacagggttcaggcaggcctgtggacaaggcggaggaactcccaggcagccaggctggcttcggcgtgtggaggcgggaggggcacagccaggtgcgagggaaggctggcatctggcgcccactgcctgcccacccgcccgcccgcccgcccaagtaggtctgggcttccctgcctttaataaccatccccaccgcagaggaacggaagctagaaacacaccggctttggcatttcaggcgagtcgagggtggattatcagggcatttagaagaaggggaagggaagaaaaagagcgctggagaccgggagaccacacagggagacagtgcacagagctgccgcagccatctgccgcgacttcatatgccgccccggaaactgacagacactgcttcagcaaggcccagcccgtcagatgagtcaatcaatcaaaaaaattcttatgaaacttaatcatagagggtcatgttagggagtggggaacagattaaattaccacagtattagatacgggaaatgatttctgtcaaaaccatctttactgcaattataatatgttaattatgtatttcattaagtaagtggattagagtctgcacagatgaaatcatgtggaggctttgaatcattcgccgagcacggtgggaggacttctgtgaatggatctcgtttaatttggaaaacttttgcatgcaaaatgtgatttttttccccttcttttgtgaccctggccctcagcctcagtggagaaaacgcccgggttgctgagaggagaatctgctgactgcctcctccatgctctgaagtcagcccgtgaggcccgtgtgctgggagccagtcccgggctctttctgtcttgcttctttcagcttgcagtgggcaaagcgatgctgatggcctgcaagggggatgggcacctctgggtgcctgctcatcttctagcacaattaggcaaagtcttcatgaggttcaaaaccaaaggacaaccagtgcatcaagaagacagccagggtaccatatcctggtgcatccacgtgtcttctggccacatcgcatgacatgcatctgcccttttcatttggcctttggggataccctgcccactgggaagacagctttaagaagctcagtggagtcccttgcaagggagatggctgccccactacgggcaggatggcccacagcgcacggggcagacacaatcagattttttgcagcacatatttcaggccagctcttcaatcctctctgccattgggccctgctgtttggtaaaagggctatttagccacctggtttccaggtatctttttttgtagttctgaagcaaggaatgggcgttgggcacacctgtaccaccgaagtccccttgggccaccatggtgtggtctgtccctccatagatggaccctagtatcttgtccctgctcatcctcagaatctaagctggacatcaggagcctgcccatctcagcttcagttcaaggcaacagaggccaccaaggagaagaccttccatatctctgcaactcttctattcttcttggcttctgaagatcttctgggatgtaaggggcagttgagtcataaacgaaataagagttaatagttattcttcagaaagaggaggtatccagtgcacatacatttcctgggtccctaagtattccattatcagtaataaccacagggaagttttgacgaagaggagaaaagagaggaggcaggcggacagggcctgcttggagtgcatggcagtgtaagtgacgggaaaaggttggctgatttgatgaaaaccccatcagcctctctagggagatattactttcctcattattccactgattggccttatttcatctgaagaatgctgtacattctttacaggcctggcaagcttctttaacaatatccagaaaaaaaaatctatcacctccttaatagaaacaacaaagaaattaacatgagccatcttcttccagggatcagtagagagacctggcctgatcccctttcttctgacctagccacccagtcttcaacccccaaaattatcaaagaaattgtttaaacgttgtacacataggatggttgagggaggagcttcttctactatatgacagcagctgaggatgtttcataaattccataaggagaacaaaggctcaagtctggatcccagcatccccctttgcacagaaacaaaatctcgatgtgattggatggttcaggaagaactcagttttcagggagagtctgtctcgatgcaagagaatcagtttcgtccctgatgaaacatagggcttctcttcctagcacaacaacagagagggaagaacaaaaatacactcgtgaaattcaggctgagactggcgttatcaatggcctggagcttgcaataactattaattaagtgcattttttcattattctttagcaaagaggtaagatttaatgatgtaagctaacaatggatgataatttaaagtggtgacaatagtttaattattcacacacacacaaaagttaactccataacttatttctttgtgagaacaagttcatttaaaatattttgaactgtgcatacaattatcacttaaactctttccttcatggctttgtagagacaaagagtcaattctccctgtaaatttctcactagacagttctacagatgaagaattctgcttaaaaaaaaaagaaaaagaaaagaaaaaaaatcgcaccattgggttttgcctagaatgtcctaggtctcaggaatgggatggatggttccatattactgtgtctttccattccaataagcaggaaccaaactcatgcaataacatgtgtatatgtgagcgtgtgtgtgtgtgtgtgtgtgtgtgcatgtttatgtggaaggtgcttctgttttttgtcagcccatcccagaaagctcgtttttccttttcgctgactattcagagttggagatgctatatgtggaaggggtgaggtgggaggattgccgcttcaggggtgattagaaaagaaaggaagaagaataaataaatactgtaagtggaagacatcctcttgagttcacagccttttcatggctttgagacaatataattgtaacatgactgagtattcaagcagctggacctcaccaaggatgttcaggagtgccagagctctagggccctgggaagagccagtgtcattgcagggagctagagttcctgattagggatggagtagaaccttcacgattatcctgtcatggaaaaatgcagaatttaaccatgtccagtgcccagtccattcctgatcctaacttcctctgtgcttccttgctgtgaaacacctccactgttaacagcagctccagggaccttacagaacccaatggagaggcatctgaggcaccatcaccagacccatgccttgaatggaagcaactcaaagtcccaatggacccaaagtcatgaagccatgattaggaccacacagtgcaagtattcagatggatattttataatatcaaatatataaatggatttgtcaagccaacaaatacttgaatattgttaagcatttgaataatccaatataacaacttcatttaggctgtcttttagatgactcatttctcagtgtaattatctcactggatggtttcatggatcaggaactctggttagaatcatactaatcctgccattggagttcagctgtttactacggttgggtgttgcataaagttgatgataccgtgtgacataagatactgatgtataaaggccagttttctaccatgattactgttcgtcaaaaagatgtttaggaaaaaatataacatggcactcaggattcctactaaaaaatgtacattctagactataagtcttctaaactctggtgaaacattctacaaaagagaaagactatgtgtaaaattaattccctctccttcatcttacttatagagaaaggagtggaaggacagtcatttaagctgagaataaaatggattgcagttttggcagaataagaaactctatgatcatcagatggtgatgtctgattggtgtttgataaatatcatccatagtttgttgaacagacatgttctcactatttaaaggtactccacataccacgtagttgctatcacttgacttcttgttttattttgtattatcataaattaaactttttgttgttgttaacttatttattgtcttccagagcaagagctttgtccttcttgtttgctatggtaatgcgggcctaaaacagtgcctggctcagagtgagtatctaataaatatttgttgagtaaatgactaaatatgtgcttaatatggttgttgactgttaggtaattttccctcccttagtctagtaagtgtgttgacataattcatttaataaagagattacaaaaatatcacctttggtggatagagttattggccccaattctcagccttagccctgtgtttagaactttgccttatgagtctgtggttcttcccattaaagggtggagcaaatttcttcactcttgtgtttgaccaggagactgactttggccaatagcaagagaggaaagtgatggtatcccagttctgaacttcagccttaagagaacttgcatgtttctgctcatttcttgtacttctgccatcaccatgaaaagaacatgcctgggcttacctgcagggcccagaaagagagcaccaaacactgacagcagagctacccagcagagccccacccgtaggtgccttgagccccagccagcccacagccacaggaatgacagaaatgtttattgttgtgtaccactgacatggtgtatttgcttgcagtgcaacaatagcaagtccacacataatctttctctgactcaacttcatgtcatccagtcccccagatggatgaccctgtacccaagacactgaattggcccaaatgaccaagatagatattatacccatgtccaagccaggacatctgtccttcattcctcagtggacagtagggaataaagaagagaaccacctgactaagtgttgtagaaaaaaaccaggttcctgtcacatgaccaggaaaaataagccatgcagacactttgaagggctggggataatggagtttattgggtgaaaaggaagaagactctcagcaaagcaagaggggttcatgttaacaggccccaatctcacagattgaatctcaggtcagctcccagaaacaggagagaccagactcctatcaccgcaaatggcttgaacttcccgaggttccatcccatcctcccagtgtgcaggtgggcatttttcagagagaatcaggaaagtgtgggcttcatttgagacctgaagtctggttttttagccttcaggctgttttaggcttgaaggcagggttttgtggggggacacttgctgcctcctgtctctatcataagggccaggacccttactcggcacttgccatgtgttgtctcattttgtcctcatggccgtggtgtcccaacttcacaggtaaagatgccaggtttgctgaggggacaccccttgcctctgttctcccacctgggaagagaagtcctgaaagcatctttcaacagtggttcttggagataattccaaagagaaggaccagccctgtctggaatcagagcaaatggatggaaaagcagagctagcgaaccaatcacctgcactgtctccatcagccccatcctcacagccgcctgaacattgaatctggcctcatctagacgtgatcccatgctctccctgggactatgttacttggacaaggaatatttgtcctggaatcctttgtaccctgctctcttacttgccttagataaccccttccgacagggagcagaatattacataagggatgctggaactgtgccttcaagatgacagcatttttgaaacaaaggcatagccataaatctaatttgtttctttgccaggctttccaaacacagcttcgttgtaggaaagtgaccatcccatcagaaaatggaataattgtgacttgcattttgaggacatatctttccgcagcctgggcgctagttcacgcattcatgtgataaatttctactgaaggcacactgtgagtcaggcaggcttctagggcctcggggcccagatcattctcttaaattagtgcccctttgttttggaagcattttagattagacgtcctttaccactgcttaccgtaggactttagatggctttcagacacacacccaagttctcgccttcgtctgcccctgataatttgacttctatcttgccttcctagcctctacctgtttccacctgaggtttccctgccctaaatgctcccctccatttccctctaacttgttttccaggacaccgatctaatggcctcagagagcaaggggccttccccaacttcctggaggagaacctttcacaagtcccttagtgacaccattgggaataataaatactttgtgacatttgatgcacaataagaatataccctgaataatgatctaatgatcacattgctttgcttttgttattgttgttaaccaatctggctcaactattggaatgtgtgcctctttcttcaggtcagggaccgtgttgtgaaaacctgagttcctgggacatattatggaagaagcacaataaaaacagatgggccaatgttaatttgcctattctgcttattgtttattgtatatgctctagaatgtatgctccaagaaggcaggactctgtctgttgtattcaatgatgtattatgagtacctggaatagtgtcaggcacgtaataggtattcaataaatattgttaactgaaagaacagttaggagcagacagagaaaatttttagcacttgtgtaacaataataattccagtctccaaataccttgtcttttcctaaaggcagtaggtcttcccgattccgatgcccacagttctttgttctccctataaacaaaacaagatattatcagtgggataagacatcccactggcaccagtttttgtcggtcgggagcaggagcagatatcagccacccagggcatctatttaaagtgaagaagctttgacttctggatcattatccacctgcagaagcacaaagatctttatgggagcaccatcttttttggtgatcacacctctggaaatgatgttataagaccaggaaattgatttcctgcattgcaaaatcattcccagggtcatcagtatcaaagccaagtggttcatggatttttttttcttaagataaagtgcaatatgctttgtgagttaagcttaacaagatgtgatgaaataaagtttatcctttgaataagtgtcatggcttaacacaggcagccgatcctggtcccttccttaatcatgacctacagaattgacttcctcctaagcaaaaagttacggcactgagaaggtagctgggtgcatggggatggggctggcaggccacttctgctgcccaatgtgaccaggcccaggagtccctcatgcagcagcgatgagactgaagggaaaataggcactttcttgcctgagagcagggtggtaaattgatacaaccattccagagagcaatgaggccctaggtacagaattgaacatatattgacattctaacctggcatttttttttgtgggaatttaacttaaagaaactctttggcaggtgggtgcacaggaaaaccagtccatgaaatgtgttctagtggtgcttgtaatacaagaaaatgatggcaagctatctactgtcactagaacagtagataaaacaagtcttgctatattcaaagagtaaaagactaagtagcagctaaaatgatgaactagagtaggaatcagcaaactgtggccagcaagccaaatcttgtctgtctcctgtgtttgttaataaagttgtattagaagatacccattcatttattcacatattgtctgtggccactttttgctctaaaaggttagagctcagtaggtataatagatactataagatccacatgtaacctaaatgcctggaagtagttacaatctagcccattacagaataactgtgctggttcttcttaaaagagagctgcatagatcaccaatacaaaaaaatgttgaaggaaaagggtagattataacataaaatgccatgatgctgtttatgtgaattaaacacaaacatatatggctatatacctaagtacaggaaagtggcacagatgggctggaaggtgtcaacctatttcatgattctaatcgcctatgggagggcccaaggagaatggactggggctgaagggaatcaaagtctatgcaaagataatgacttattccttctgctgcatagacttgaaataaatataacaacattatgctcccaagggaggtaggcagagtccgcaggatgcaggcctcgatgtttgaggcataggctgcttctaagaccgcttttcccagccctgcctcaccctgtggtcactctcgtggtacaatgaacaactttgtcaactgcacgtggcagacaactctgacctgagggctaaagttcaggcagaacaatgtattttagacaaataaataattgggattgaggacaaaactatagatatacatataatttggaatgccctaattgtactttcctactgctaacatcaccacttaaaaatgtgagatttatctaagtctgtgccctccaaaaccatagcttctagccacatgtggctactgaacactcgacatgtggctgggacgaaagaaaatgtactatcaatgtaaaacacacaccggatctcaaggacaatagagaaaaaaatatatgtatctcattaacaattcatcctatccatggcaggttaaaatgatcatgtttggtataccagtggattagtctactattgcagctgtaacaaattacttcaaagtaggtggcttgaaacaactccaatttgttatctcaccattttgtaggtgagaagttcaatgcaggctttactgggataagactgagatgtcatcaggactacattcttttctggaggctctagaatggtggtccccagcctttttggtactagggactggtttcgtggaagacaaggtttccacgagccagagttggggatggtttcaggatgattcaaaaatactatatttattgtgcactttattgctatgattgctacattgtaatcatataatgaaataattctacaactcaccataatgtagaatcagtgggagccctgaactcactttcttgcaactaggtggccccatatggggatgatggaagatggtgacagatcatcaggcattagattctcataagaagcatgcaactagatccctcacatgctcagttcacaataggggtggtgctcctatgagaatcgaatgttactgctgatctgacaggaggtagagctcaggcagtaatgcaagcaatggggagtggctgtaaatacagatgacacttcactccttctcccatggcaccactctcgctttctcttatgcctccctcttctacgtttgtttgtttgtttgttttgagacggactctggctttgtcacccatgctggtgtgcagtggcgtgatctcagctcactgcaacctccgcctcctgggttcaggcaattctcctgcctcaacctcctgagtagctgggattacaggcacccatcaccacacccagctaatttttgtatttcttgtggagatgggggtttcaccattttggccaggctggtcttgaactcctgacctccggtaatccacctgcctttgcttcacaaattgctgggattacaggcatgagccaccatgcccagccatccctcttctacttttaaggaccttcgtgattacagattatctagatcacatccctatcttaaaatcagctggctagcaaacttaattccatctgcaacctcaatgctcttttgccatgaaacaaagatttttgaacaccttcggggaggtctttattttggctatcacaattgagctaaataaaaatattttattaaaattaattttacctgtctctttccacctttttaatgtggctataagaaaatgtaaagttgtccatgaagctctcattctatttctattgggcatcactgcttcaagatgtgaatgtgcttcaccaactataaggtaccttgatggtgaggaatgttaattgaaagaaaatgactttttatgaagtgacttttattttttttctttttttttcagataggttctcattctgtcacccaggctggagtgcaacaatacaatcatggctcactgcagcttcaatctcctgggttcaagtgaacctcttacctcagccccccaagtaactgagactatagctgcatgccaccatgcccagctaatcttttatttttcatagagatggggtctcactatgttgcccaggctggtctcaaactcctgacctcaagcaatccttctgtctcagccttccaaagtgccagaattacaggtgtgagccaccacaccccagaatgttgctcttgaagatagcaaaaacacacttccccctggaggaataaataatactacgatagctcacatttagtgagggcttacaatgggccaggccttgtgtttaaatatcagttggtttcatctttatattaaccccgagacaggtactgttgttctttatgtattgcaagtaaagttgctgaggcacagataggttaagtaatttgccaaagtcacacagccaacaagtaggagcacaggctgtggactctggaggcctccctctaggtggtgtgcacgtgttagacatcagtttgcactgtaagatgcatgaagggtgctgttcttagacacaactggcaaaaacaacaacgctctgcggtctatctgcccctctgccaagaaactacaaaagacacctcttctttgtgcagctcttcagagtgacaaccctggtatctaactcccagccataaagcgaatttcccctggatactctgtcttgaggcagccctccaaatgggtatttgagtctggctcactttttaagctccacgtgtgactaattcccaccagacagacagcagcaggagtccagcagctgcagggaaaggcctcagcttctaaggtcttgaaggaaagggatagtttagccacacacatattcgcacacacacacaaacacacaggcacacatacatacacacagacacacatgcatacacacatatacacacgtatatacacatacacacacgtatacacacacacatacacaaaactacacacacatacacacatacacatacacattcacacacattcacacacacatgcatatacacacaatttaaatatctctatacttatctctacttaaaatatttgtgtatgtccaaatgaatatatatatatgctttaaatatctttttctgtatgctgatatatgtatgtctgtgtgcacatgtaaatttgtcatgcatttccttgtctttctcacttattttacccaactctttctctcttaaatgtctctacagctcaagatttccttacatagttccaaagttaaattttatttaacattcatttatatatctttgcgtgcgtgtgtatgtgtgtgtgtatctcacatggaataattcctgatcaccacacatatatgaatgcctctgtatgtgtataaacacataataaaagtacatccatatcaccaagaaaaacattttaaaaattattttggtgagcctagattctggatgcctgatagcggtatgatttcctacagtgtatttaaccaaaccccactccagtattaaggagcacacacaactagaattatattttactagcagacaactctgaactaaggactaaagttaaggcagaacaacatattttagacaaataaataattgagattttaaacagaagtacatgcatagatataatttggaatgccctaattgcattttcctatgctaacatcaccagttttggagatatgggattcacagttttagggatatgagtcccacagtttctcctctttagaattcgctctttacttgacctcccttaggcacacacaacatttcctccataagagatgttctctgagtcgcatctgcatttcctaatatctggaaacccctctgggtcacccttcccctcagtaactttgggccacctcctgggccctgatgtgcaggatccaatcaggcagacgtgcagtttgcatttttagaaccggcctattctgttcctttgccatgctgtggcaagccctttctgtaaagggccagatagtaaatatttttggctctgcaggccacacggtctctgttacaactcaactctgccattgtagggcatgaatcgtgggctatatgtaaatgaagaggcatggctctgttccagtgacgctatttcaaaaacaggcgatgggcctggatgtggcccactggccatattcctgacccccgccatccaccaacatgggtcgttatctcctgatatctgtaggtcactttcacatatgtctagctgaggtacccggtgagtattttagagcccagggaactcatcagtggctgtgctcatgcataattaggtggtgaagccaatgtggtgatttgaagcttcgttatttgctcccctgattttattctccaaggatctgtgagttccttgcgtgtcctattgatcactttttccccagcaccccagcacagtgcctggcccacagtaggtactcagtactgatgaaatacttaaaaaaaatctgattataatctaattataatcaggtagaatttaaagtataatattcattcaatactttttcagaaagtggtaacatcactcttgaatggataatggaaatgttgctattatcgggctgtcagatgaaacaataatttatgtgagtcttgcaaatagaggagggggaaattatttcctggcccgcccaaatttgtttcagacacttgaatggatgaatgagtaaatggatgacggcttttttccgactttcttggattttcctggggcatggagagctggagtcttgcctctctttccttttccacctcacagcacacgtcattttttgatcatgaaatttctttaccaccaagatcaggcaaagcctcagaatccttgtcaactcagctccctatgcaggtactcacaatcagtccaagttaacaagtgctgtgaaatgtctttgttatccctaaaccaaatgttttcttgagcatctactatgtgctcagcatacatgaggttaggcaagattaacccaaagtagggaggtaacaaggaaccatggcacagccaggggtgtcaacataagtgcatgggcactcagagagaccccgagacctggaaagcgtgggaagtaatggaataattccagttcttagaggacccactttgtctcaggtcctgtgctacagcttttatgtgccccactgaatcacacagcagccaataagctaggtctctctcattatctagagaaggaaactgatgttcttaacattcctaggagctgcaattgacacccaagccttgggacatgaagctgtgaaaccaggggagatgaactcaggtgtgttcttaaggatgccaagaggaggtaaactagtgggccttacagaaaggataagctttgttggaaaagaatgtaatctttggcctatttcatcagtctgaaatatgggtgcacatgtttaaatgggtagatgggtgggagggtagatggatggatggatggggccagataagctaaagcatagggtttgaggttgagttggtaacactaagtctggaaagatgaaatctgattataaagggccttgaatgccaatttttagaactcagatttattctgtagtggagaatagagaggcatgacagtttcagtggggagtacaattattggtaagatgctttaaaagatgactatggtggctgggcacagtggctcaggcctgtaatcccagcactttgggaggccgaggtgggcggatcacttgaggtcaggagtttgagatcagcctggccaacacggtgaaacccacctctactaaaaacacaaaaactatccaggcctggtcgcgcttgcctgtaatccaagacacttgggaggctgaggcatgaaactcacttgaacctgggacgcagaggtttcagtgagctgagatggtaccactgcactccaatctgggtgacagaatggaactgtgtctcgaaacaaacaaagaacaagaaagatgactatggccccagtgaggaacatggattaaaaggacaggctggggcacacagctcagagaggtgattgggcaccaataatcccatcaagaagagctgcaagtatatactgggggcttaccctgcaccaggcaccctcctaagtgcttcatgggcattttctcactcaatttgtgcaagatcctaagaagtaagtgcgtgtttatcatccccatgttacactgaggaagctgaggtgcagagaagctaagtaatgtccccaagttggtgcttacagtgagcaggtggtcgagctgggagtctcacgtgagcggctggctccagagtccagacccttgaccccgacacctttttggtggtcagggacagccagaggtctagaggacagtaaaggggataggcattggagcaacaggaaagagaacgagaccagccaggtggctgttttagagcttctcaggccatcgacccagaacatcgcactattgcccatggaagctgaatgccccgctgttcctgcactgcgaattctggggacgcgctgttgacctggacccctgagagaaacccaacaagagcccctggaaggatagaaatctcaggtatgcaggattgcatacttattcattaataaccaaagaaagaaacactaatatttctttataaacgtgaaatgttagacactgttctaaatatttccctggcagccacctacagcctagcacagtgcttggcacagagcacacactccatacacatttgttgaataaatgaatgaatggtgagtgaatgaaggagcactgtgctaggagccagagcctcgggtcccagtctgagcttctccatcctcctgtttgatagagcttacacaagtcacaccgacctctctggacctcagttttggcagaatgatgggcgagtgagccagggaattcaaagattttaaggacgctgcgtgcatgaaggctcctgttccagcagctctccccggggtgaggtgcagctcccaccaagctctcctcctttcccccctttgtggctgctgcggtggttttccctctctgcaacaggacatcaaatggttaatacaccacccatcgtctttgatttatgaagtggccgattggaccaggaaacacaacacagacagccttctcacttgcaggggagaccccagagagcagtaattctgtgcataaaagcgagcggcagcctcgggcctcagtggtggtggaaagcccaccctgccgagcccgtcccggggatgatgccagggccggcgtttgttcctgctctgtgcagggacagaggcggctttgtcacctggcccctgtcgtccacccagccccggaatctccgctgcccagcctttgccctgagaactgaagtgcagccctgccccggtcaccgcttagcggttcctttcagcgtctgccaatctatcaagattcagctaccgctgtgaacccatcaactccatggaaaggaaaaaaggaaccctcaccacagcaattatttatcctggcctgaacttcaggtgacctttcccaggtccacagaagttgcagatgggagcaccttggtgtgtaggattttttccccactgtgtccttttaaaaaacacattttttttcatgacatgaacctcttttgcaaaattttcttttgcaaaaagatctttgggtggtctataagaccacaacaggggtggaacattggcctacctagagcacagattggatgtaaacgaagtcatccaaagataaaataaacgaagaaacaaaaactgtgacctcatggggatggtttcagagaagacccgagtgcagctcacccacaggccagctcagccctcggacaaaaataaggggctgttctgcaccaaaggctctgccctgacccggggagatccaatattgtaaactctgtgggtgggtatttgtgtgtgtccccgaatcagagaaaaatccaggccataacaaggactatgcagggtgtaactccccgtgtaaatttaaagtgacctaagggacataattacataaatctcatcatgagacaatatactttttatttgtttgaattttatttgtattggtaaaactgacctgaaactgacacaagtttattagaaaaaggactctgtaaaagcaagtgggctggtcttcttatttaagatggatgtgccgacttctagtatgattagagaaatggataactcactaacatctgtgcaaactacaataaaaagggatttagtgttaccccaaggaaggcaagagaggctgtctgtccattaaacgctttattacagcgccagcagcttttttctaattcagttattcctgcacagcgttcagcactctgactgcctgtcaacccaccagacagtgctcggggctgggaggttttgtgcaaggtaggtgacaatcaaatgagccactgagaagagaggggagcctgaccctcgtgaaggattaactacagaaagtgagtgtgatcatgtcacaccattacttagaattttcacagtcaatttctgaaaatatgagataagttcttaaagaggcagttgtctcaggagctaagcagacccagtgtggttttgttccatgtgacagggcagggagcctggagaaagagtagggacttcgagggagagggaacaggtggcatcagcactgtgcctatcctctgtagggcattctagagccaggccttggagcaactggctcccaggaaggctgcagccaagaagggagaggatggagagatgccttctgggaccaagatgccatatatccctcctccactggatgctggaatccagcctctcctggggtcaactgggctaatgaacatgaccctttggtgatcatattaggctttgggttcacaggaagcctgtctagggcagtcaagatgccggtgctgggatgaaatgtccatcttctatcactccttttcacccctgcaactgctacaaccaatatcatcataagcttccccaaaagactatatgcccctacggcatgcaaaaagatccagtcccacaggagctcacaagccacatgcttaagaaaagtactatatgctcaacacaaatatacttgagatatatattttcaaagcctggcaaaggtagatgacagtacaaggaagcatggcacattttggggccagagatgagtctgtccctcatttatagatggcagatctttaacacaaaaaggggaaggctccacccagagcacacgcaatctttgggaagtggagctgagaccggagccccatgttcctgatctcctgaccaacagaagttatgctacagggcttcacgcagtagggctttttgagaagatggactggaaatgtgatttcttcctttgcatctatatatttaaatgagaaaagtaaaccacaaacctctaagcttggttctgctaaagtaatttaacatctgctgccacctgaatgtaattgaaacaattcattatcaaatttactgatctgcttaatgattttgtatttctctttcaaaatcaccttcctcctaagctagcctaggtaaattaccctttgcttcaaatctgagagattgaagggacctgggagaacatccaattcaagccccctcactttaaaaatggtgtaacagtgttttgtgtgtccatggtgaggttgcagacctttatcgaggtcacagagcaagtccagcaagagttgaacacaggctgccagaattccacccttgtctcattccgagattgtgtgctgagggttttcaactgcatctctaaagggaaggccaaagaaagagcaacaggaaaggatggtaaaaagggggtagaaaggaagaaggaagggaagaaaaaagggaaaacagcaagctctctttccagagccacacatttttttctgtttgctcagtggcagtctgttaaagaaatacttcattgtcactgaacacagagtcattaaaggcaccttggaaatttggacccttttactagaatcagggcttaaatagcaacttaatttatgacacttctcgaggctgatggcgtttttgctctaaggtaaggtcatctcagtatatacccctcccgtcgcttccctttagaacacgcagaggcgtttcctctttactttcaagttactgattattcaactgctcaaatgtaagtcacatatgtatgtaggcacgtttgagtccacggtgtgtttctaaaagagagctcttttatatctgcctgtaaaagaggagagctcaaagatgggggaacccacaaataagcaagtgaataattagatcagagatagatgccaccttttctcagtgttaaaactgtgaggggaaaaagtactcgtgcataattgacataattgatctagtatttttttttcctttttgctgcagtaatttttatgcatgccattgttgctgttattatccaagatgtgatcttgcgtggttgataatacaggctagatatgaatacgcgtacgcaccagccaatcacaaatctatagtgtctatttctgcatcaccaggtgctatctcatgggaaatatcctcttttttggcaggcacacagagcactgcattatctgtcattttcattagattcaagctacagctgggccaaaaagacttagttctagcatatgtgctcaaaatggccaagctgcgattgtccaaattcaccctttcaagattgcattactgaacaactggagccaaagctagaaattggagagagcaaagcgcctgaattccacttggaaaatggcaaacaccataggctctgaagattgaagcgtattatcatgactaactcaaagggtcagaggagacactggcttccaccagcaagctcaacgtcttttggcacatctgaggtggggatggaagctgcaagagcctagattttgacaccacttaacaaagaaaagccaatgtctttcattcccctctgtgcctttcagtataccttggccatgtggaatgcaataggttctgtacccaggtcttgacctgggccagctggtcttgagccccgtaggacgtagtctgtggcctgctgcatacttggatagtgtggggtgtataaaaagcaactcatcctgagggagaaaagcatccaactgtcataagcttgagtctccatgcaagtctccactattttataaattcagttctttatgtgaacatgcgaagaagacatattgaaaaattagccccacaaagaaataaatacaaaaatccccactccaggttgctggaaatgggagaaccacagggctggggaagatggtcactccacccagtggacttcatgttatttgaagcagacattgaaaaaaaaaagagagagagagagagagactagttgttcaagcagagaaaaagaaagtaaaaaggccagtgggaatgtaaaatagtgcagccactgtggaaacagtacaggggttcctcaaaatattaaacatagaataaccatatgacccagcaactccgctattgggtctataccctgaagaattgaagagatacttgtacacccatgttcatagcagcattattcacaataaccaaagtggaagcaactcaagtgttcattggtagatgaataaatgaataaataggcaaaatgccatagagacaaagtagaacagcactcccaagggctgagaagaagggggaatggagaattactgtttaattcagggttactggtacagggttccagctggggaagatgaaaggattctggagatggatggcagtaatgattatacaacaatatgaatgcacttaataccactgagttgtacacttaaaaatggttaaaatggcaaatttcttattatgtgtgttctaccacaatgaaaaaaaaggaggtttgtgtctggtcctggagacacagactccctgagtctgtgccgcagcaacaccgagcaatgctgtgatcttccagaatgccagtaagggtgagcccttggccatgtgtcctttgagcgatgtgcaaagttccaaagacagaaggaatatctgggatttggttatgaggatatatgctgccctagaattgtcccaggttttcatgccagggtggagacctcacacaccatggtggcaggggatttctgcagggagaagtctgctgacaaacccatcttatgggttctggcatcttggccacagacagcagtcagctgtttttcatctgcactgctaatagggtctagctgaatggctaacaagcaaggtgaaatgtagcatgaatgttttgaaagccatggagcctcactttgggttcaggagtagcaaaactagcaagaaggtcactgttgctgattggggacaaatgtgatgagtgttgggggcttaaacaacagggatgtattttctcacagttcaggaggctgcaagttggagatcagggtgacagcatgatcaggttcgggtgagggctctcttcctgacttgcagacaagcacctccctggtgagtcctcacatagggattgatgggggaaacagagctctggtagtctcttcctctccttataagggcactaatctcatcatcagggccctaccctcattaccttatctaaacctaatcgcctcacaaaggtcccattctccaaattccatcatgttgaggtgtagggcctcaacatatgatttgggggtttggggggacctacattcagcccataacaaatgtgactcttaccttcaccaaaccattcttcctgcagctaaagagagcatcccacatctacatgctcttgggtcctgtggtccatctgttctcattagctgtaattctttgggttccatatttctctcatacccttccaagtccagctagactgcaagcatcagtttatgaataggaaattaaaagtaacctacaaaacacctgattttgaaaagatgtttccccacaggggccctgttgtctattaattgtagtgctttaaaacaaagtaaatatttttttgttgttaaaagaaatttcttcttgcattttctttccattatcaccccattaatggagacgaggtaaggcaatctgaaaacatttgagtcagagaatatacaaacaaactttcaaactgtctttcagcaagtgaggctaaagttattgaatatgcaaattggcttattaaaagaagaatgatgtctttttcagcaatcagtttaattacagtggaacccttcaatggagaaatcaacttgtttcttagagtagaaattctttagaaagggaatttaggtataacagatcaaaattagaaaatttacacttggtgggaaaaatggtctcagtaaagaaaaatgtacacttggtagaaaaaatgaggtggtgggggaagaggaagagagatgccagtaccccgcttggtagccttgcctgggtctctgagccccaggctatttgtttgccattgtcctgctctacagcttgaaggcggtgttaccaaaatgccaggggtttggtctagatcacgtcgctccctgcacagaaagacaatcactgagacaatgagtattgccagggaagaagactttattcagatgatgcagcccaggagatgggagatgagtcccaaatccatcttcccaactgattcaaattaggggtttatatagcagggaagaaatgtaactatgtgtgggaaaactgaaattagggagcagtctggaatctcagagtttggatgtggtgatactatctagaagccagagaatcagtttcctgagaaaaggactcagctcatacaaagataaatttcaagctttaagacagggagggtgaatttctatgtttattcaaaaaagaaaaaaaaaaacccataaacctcagttctatgggacaattaggcctgtttcaaaagaaaagatataatggcctataaaaggtatttatgcccaataactaaggcctcatactccctgtggggtaggagtggatttttttagggttgggcccatgtgcaccaggaccagaattaatgtgatgtcagtattgagaaggccttccatcagagccctgtccattctgccccaggcctttccctttcccctcagaggccagagttccctgcccagtgtcccatttctccaaaatcttctccccgctcaggtattagagatctgagtaaccatgcaagcctctcctcagtgaagacccatttgttcattccaggccttataggtctgttttaatggagggtcccgtggttggggggatactggtccttcaagagacaccaaaacaaccatgacaactgagaaagatctctggagagacctggtctggaggtacacttcacccatgtcccaccctcagctacctccatatcatagtgcccttggaagggcggccgaccaagatttagggcagaggtttgaagtcacactttttgggttgactctctgctactgacagcatcaacttagtgacaaccagcaagttgtagatcctctctatgcctcaatgtgctcatctgtaaaatgggggcgataacactgtctgtctaataggatgggtttgaaatgtacagagaaaatcaggcaaaaatttggtataatatttgtcccactgcaaacattccttcaatagtcatggtggtggcagcagtacaaatctcccatgtacactgctttgttaccttagctttcacacaagtctgaaatgcaaaacatgcaattcacacatactcaagaaatgcacaggcaagtgttccttcagtaaacttcaaattcttcagcagagaacacacgccaacagtgaacaaaactgggaaaacaatccctatactttaacgttctagtggaaagacaaacaataaataaaaagcatcatgaacataaagatcatattttatttcagaagtatctgcagggaacagaagaatagaacaaagtaaagtggtcagaagacctgaagcaagctaagcagttggcagcggcaatgtaaataggatgaacaagatcaggctcattgaggagaggttgagcaaggattttaaaatggagggagccatggaaatctagaagaagagaatcttagggagagaggcaaaggccctggggcagaagtgggcctgacctgttcctggcacagcagtaggtcagtgggaatacaaggagggagtggcaggagttgggaaaaaacacccaagatagggacagaaggtgatggggctagatcatgtagggtctcagagccaccataagggctctagctcatgcttagatgaaatggcagtcctttgtagggctcttgagctgagaagtagtattaattatctgactcttatttgaaaaggaagatccaatgaccatgtggtgggtcacttgggatggggcacacatagcctggaggtgagggaccaagctggtagcagcagttgtggatgcgagaatattctaaatgtggaaatattctaaaggcaatccaacaggcttacctcacagattagatgtggggtctgagagatacagaggagacaagatgacttccagattgcatttaattaatgcaaagtagtttgtaaacaaggaatccctgactaccttgtttgttgtgaaaaacaataaatctacatttactctcaattgctaagtgcttacctatagtgtttaactcagtacaaaagactatactgcacatttaaaaatgaggtcacattaagaatatgtcatctatgcctcaggtgaggaatatgctcagatgaggacattctgggcatcaggtggtaaatggaaagcactcataagtattttacttctgtctgtttcttgaaaaaatatgttcccatcccagggcatttgcacatgctatggtttgcacctaaaatgttcttttctaagagctttgaacatctggctgtttctcctcatcagctcaattatttcctccaacctggccactctctcccaccggatcctgttgtattagtcaaggttttccagagaaactgaaccaacaggatacatagatgtaaacagatttattatacagaatcagctccctgtaatcccagcattttgggaggctgaagcgggcagatcatttgaggttaggagctcgagaccagctttgccaacatggtgaaaccccgtctctactaaaaagtcaaaaatgagctgggcgtggtggtgttcctgtaatcccagctactcgggaggctgaggcaggagaatcacttgaacccaggaggtggagactgcaatgagctgagatcatgtcactgcactccagcctgggagacagagcgagactccgtctcaaaaataaaaacaaacaaacaaaaaaaaaaattggctcatgtgactatggtggcttagaagtccccagacatgcagtcagcaaaggggaagacccgggagagcccatggggtagctccagtttgaacccagaggcctgaggaccaggagagctaagtgtacattccagtctgaaagccagaaggctcgagacccaagaagagcagatgtttgagctcaagtccaaagacaggaaaagaccagtgtcccacctccatcagtccatcagaaggagctacctgttcctcctaggaggtcagtctttttgttgtattcaggtcttcagttactggatgaccaccccacctcacattgtggagggccacctgctttgcttagcctaataatttaaatgttaatctaatccagaaacactctcacagaaacacccagaataacaataatctgggcatcctgtggcccagatcacctaaaatgaaccatcacacctggtgtgtcccctttgtattggtattttgtgactttatcttagttatttatctggttatctatttatgggtttgtcttctctgtgagagtatcacatccaccagctgtttcttgaattaatgaaatactgaataaatgaaaactttctgtgtgtgatttgagatctaggagagagaggcatggaattttgctgaggcaaggtgacattggtatggaggggagagggtacttgatgagaaccagaaggagccagggggctgaacaggagtgggaccaggagagagattgggaagaaagtagactggatgggatcaaaccttatgggaataaacaaaaatccatctctgacagccaaatcccccctgcatgcattctggcttttatttttaatctggagcaaaacatcccctggcctgactcctctgacttgggtcccacacagcaaatcaaagcccaaacagggcgggtcccaggctgggctttcctggaaaagtgaggagtggaaatgagccttgtggtctcaccccagccctggaaggccatttgtctgtaggataaaggggtcaggcaatggcccagttcatcatgactggcaaggctgccccaagaggcccagagctggatagacacaggtcagtttcctgcacagccagccagccctcggccgggaattcttacattgcgctttcctgttggcacatacggctttgtgttttgttgatcaattttaatgaaaaaaaataaaatgaaataaaggagaagctgtcttcaagtgttaaatgttatgtgcataaatcttgctaaaactgtgaagagaaatacccctatataggacttaagctaaaatcatctctcccaagttgtcatgtttttaatttgtttgtgttttttttacaaattttagatagaataattggttttagaagcattgctctgataaaccttcctctagggactctgtggagaggttctggtagagttgagccatgtgttcagggttagattgggtctcagaggctggcacaagggtgacatgaaggacaaggttcctccttggcagggtcttcaggaaagggagcacatcctagtggggagaaggaggctctggctcaggcccttggtgggtacaaaggggcaggagtgcccaaggcacagggcctcagatggaacagctgtgtgtctgctctctgttgctctgagtggaggcggccagtggggccctggccaggagcaggcagggagtggtgagcattcttcccccatcttcctgtccctgagcactgcaggcctggctggcatcagcctttacttagccccgcatctctgcccagtacttgggaaggttctggtctgggaatcaagaagatggagacacagccctacccttaggagcctatgattattacttctctgtaaaatgagagaaggctcactcagagacaaggaagggaacccatgaggggctgcaacttgggtctgaggggaaagttctgtgtgggctgaaggaggaggaagccctctggggttgggggcaccttgagtcagttttcacagtggtaaaaagagagggatctctaggtaggtggtgcagactgaggcaaggccaggtggtgagaataatccagcccaggggacatccaggagagaggcttggctggacccaccagcagaagtcctgtagatccatccggaccaaaggaggtgagaggctgtgtaggggaggaggggtgggcacatgtttcagagttgacaatcaagtttctaactatcacagatgattttggaatatatagttggaagagaactcagatgagtcagtgagaagtgatctgaaagaaaaatggagaaagatatgaagagatactttacagaagtgaatatccaaacaacccatgaacctatgaaaatctgttcaatctcactaatcatcagagaagtgcaaattaaaaccacaatgagtccaagcatggtgtttcgcttgtaatctcagcactttgggaggccaagtggggaggatcttttgaagccagaagtttgagactgggcaacatagcaagactccctctctacaaaaataaaaataaattatccaggcatggtgacacacacctatagtcccagctcctagggaggctgaggtgggaggattgcttgagctaaggaggttgagcctgccatgagctgtgattgcaccagtgcactttagcctgggtgacagagactctgtctcttaaaaaaaggaaatactgaaaaacaacaacaacaacaacaaaaaacacaacgagataccaccacacaaactggcaaaattggaaggacagaaagtaccaagagctgacaagaacctggagcaaacagggctctcatgccctgctggtggaaatggaaactggtagaatcacttgggaaaactggcagtatctaccatgtgtaccctccatcctggcaatgccactcgtaagaatgtacctggcagaagtatgtgcatatggggcaatgatagcacctggcccttgggttgctgtgagcaaaaagagaatattcctgccctatcccagcagacttttcccagcagcatagtatagaattgctataaactgggacctatccaagaatccatcagcagaaggatgcatcaatggaccatggcgccttcatacagtgggttactgtaggcatgctgtatttcaaattaaacatttctgaaaatgacttggatttgggaggagtgagatgtgctaagctctcctgtgcccccagaagctgcaggagagacatgatataagagaatggccagccgggtggtgtcagcatggttgccctccctcaaggggccccacgggaatctccatgtaatctccatcccttgccttcccagcctcggggctgctggccgtctgcaatgttccttggcttccagccacatccctccactctctgttccatcttcacatacccttctcctctgcatgcctttgggtctcctctctagctgcctgtctcttacaaggacacatgtgcttgcatttagggtaagcttggaaattccacgatgagctcctgctttcagcatccctcacttaaatcccagtgtttgctgtaaaatgtaacagtcataagttctgcgcgctgggaagcaaatagatctttgggggttgctttttttccccatttgtctgctgaccacatctagaatataataacttgacatctcagggcaggaatattctcttttgaagctcacagcaacccaaggacaaggtgctatcattgccccattttatagcactgcgcagagaggggaggcggggacagagcagtgacatgaacctgatgttcacaatgagaataagacaaatgtttagaggctcctgtagtccactttctggcttcccctcatctacttttgtaatcaaacaccacggactgggcattggtggctgcaagtgtagacaatggaggctaacaggcctgggcttagagctgcctcaatttcctcatcatgtcaatctcacagcagggacagcctgagcatgaaaggaaacaacatatgaagatacttagctcagggttagcaaatagtaagcttcccattgatgatagatatgatcgttctttttgtttaattgaacaaatgtttcccagtccctccagcatgctaagccctgggtggtagtcacagtttgcagagagagctgtcagcatctcctggctactgggactagctggagtgataatagtattcagggcaaatgtcagttgttcctcattcgcacccctccttcattcctgcttgccacaaggatctatccttaacagtccatgttaaatgttggcataaagaaggtgctatcggttgggcatggtggttcatgcctgtaagggaggccaagtcaggtggatcgcctgaggtcaggagttcaagaccagcttggccaacacgttgaaactccatctctactaaaaatacaaaagtagccgggcgtggtggcacatgcctctaatcccagctacttaggaggctgaggcaggagaatcacttgaaaccgggaggcggaggttgtagtgagccaagatcgcgccattgcactccagcctgggcgacaagaacaaaactccttctcaagaaaaaaagaagatgctagcatccttgcctctctctttgcaggaattcacagggcaaaaggtacagaaggaaactgtgctccagggtgagacatgtcatcagaaggctgtcatctggaccttggaggaaggacaggtgagtgatgcctcctgtagaagataatgcctgagctgagtcctggaggatgcaaacaccacgtgcttcagcttcaggtgtcaatatctgaaagttggctgaagaaatgtgcacctgtgcctctggggaagatggtggtggaaatcaggaaatatagtagttgaagacagagcaggagacctggactgcagaaggcactgatgatgatgatgatgatgatgatgatgatgatgagcatgatggttgaatggtcaggatcctagtgggaaacccaggacacacccaaggttgactgaagagcttcctgacaggactactcacaacaatggggaaagggactaacagaaaacagcaagggaagataaaacactccagggctatcagcagcagcaacctccatcaccttgtgacctgaagggccagggaaggagcagtaaccagaacccagagagagctgtccagtggaagaggtcatctgataacctttgccaggagaatacagccactgtccatggtggcccagaagagagaaagacaggggaacaaatactctgactgtcctctgatatccatctcttgtagtgctcccaattagccattcccaactagaagtcaaagagtaagagagcctatggatgaagtccacattggtcagcttcctggagtacagagcagggtggaggaagatagaaagtagatttggaggggggcaaacagagaatctatccccgtgatgaagacaatgatgatggtgctggtaacagtgataattgtggtggtggtgatggtgctggtaagaatgatgatggtggtagtggtgacagtggtgtttgtgatggtggcaatgatgatggtggtggtaagagtgataattgtggtggtggtgatggtggtggtaacaatgatgatggtaggtggtggtggtggtggtgatggtggtggtgatggtgggggtgatgataatggtggtgatggtggtggtaacaatgatgatggtggtggtgatgatggaggtggtggtggtggtggtggtagtaaagatggtggtgatgatgactaccatttattgagctcatatagtgccactcagcgttctaagggctctcaaccttcacacgagcccagtaagatagggaggtagagattctcagagatttgggagatctacatacagcctaactgtcagagctggcctctgctcccttggacctccctgaaaacacaggaattggtaaagcccctggtcctggcaatttgtattataattacatttgagtttgtttgtgttccttacccctctgtgagctcctctaggtaagtttagtatctgattattactgtagactagggcttggcagtgtctagcagggtatctgctactcaggaattgctaagccaatgatgattagtgagtgaatgaatgaatgaatgaacgaatgaatgaatgaatgaagagtctgtgacttccagtcctagatagcaaggtacgggctgtacacctgctttctacagagcctggcccaccataggcacttagcaaatgttggagataatccaacacagtggcaccgtgacatttctgttttctctggtgcacgtttcctcacatctaaacatggactgaaagacatccaagcttttcaaagctatgtggtttcctgaaatttccacaagcccaaactctgagctaaaagtgaggatgtttgtcctgtgtctcaatgctgcacatggaaactcacagcccaacatagctcagaattgctaatcaccttgggattgttgtgttaataagtgaaaatacagaaacacaaacctgtcttcctgttaatgttaattttggtcccaaaaaatgttgctaaaacatattgacgggcatgtcacagatgttccttctttcatacatgcgagatgctgaatgtgagagctggacgctttgacaggatttctgttgcttttatgataaccgccatcaggccatcttcctaccactggggcccggccctttatctggccattctcctgtgcagaggctcacgctggggcaggcatgtaattctgtatctactaccacaacctgcacaatagactgataaaggtaagcagcttgaaaaaagatgagcgatgtcaccatcttgtcaactcacctgctaatttcagtatatgcagaacatctgtaacagcctgcttggtggaggactaagttgaatctcaggttgttcattcccagagctcattagggggagagatgacacaatggcagggcaggtggctctccagtttgacaccaaggtttttaactcatctgggtagcagagatttagatccacttaccagtttttgaagaatcaagcagaacagcaccaacttccctcatcttgcagtggccatgtttaagcataagaaggtgtctcatgatttagcgtgattaccaaagaggaaacccatccagaatcttctggcttcatggccttttccttaccatgcaggaagcagattggcagggacctcagcaaaggggcagggtaggttctggtaatattttaggcctggtaatattaccaggggtcatgttatctgttttggaagatgtaccatctgagcagagagaagaagggttttctccatgtctaaggggtttcttttagaatccctctgcagtagcagtgctctgtggctgggtcagaggagagagagaaccaccgtagtggcttggggagggagaacggagacagtggggcattaaggagctagacttatgccagctaccaggaagaggctctatgctaagcagaaagcatgggcatccccctccagacccacaccagcagaatttgtgttttgttggtgtgcccacaggctgacagaagaaatgcaacaaggaagaaaaatgcaatgaggaagtgaaggtacagtcccaggccaggggacttggaaagtggccttctgcttttttttgttgttgctggacattttttctttttgcaatattttcagccaatttcatcaaatgaaaaattgccacctcgttgtggatgctttattctggctaattagcactgatgaggaatcctgggtcaagctaaggacacagctacatgcaggactccaaagagaagccagaaggaactggagtcctggccagatcctctagagtccgtgctcctgcaggcatctccactgcaggtgaatgcagtgtctgtcatccccactgcaaaccatgattgttcccatatggattgaggcatcctgagagccgcatgctctacatagagataaagtaatttttactattcctccaatgtggaataggaacttggagagtgagctccatcagtctctgcccagatttggagaaagaacccagatagaaccaccttttccagaggcattgagagcaggttcaagctggggaaacatcttcccaaataaacatttctgtaccgatgctgtgaatccagcaaaaacgaagagtgcatggaattgttggccagatgcaatctcagagagctcttgttccagggagaaatgaatccctcagacaataatcctcagctcctcctagctgcgcccagctgaagtctgcctaggggatagtggaaggcactgtttcactccacagttttggaaatgtgcatgcaacatttctaggtcacaccaaaatgcacagcccgtgatgaaaaatccaaatcctaggcaggtctgaggaccgaccctaaactcccaacccaacccaagaacctcattccaagtgcttctaaggaaagcagagagtcaaatagaatccctcaaaggaaaggagaagctagctggtgtttcttgcaatgtcagacacgcctcaactttccctttagaatggctttcctttgcagatagaagtgtattgctttaacccatacaacacgtgtccaatgtgttaaaagaagataagtttcttagacaaaaaaatacatatgtaagactctaattcacagaggacaagtaaagtgagactcatgggccctaaaataggtattgtgatgtttaattttatgtgctaatttgacaaggccacagtacacaggtaactggtcacacacatctggatattgctgtgaaggtattttttagatgagactaacatttaaatcattagatttagagtcaaacaggtaaatctccataatgtgggtgggcctcatctaatcagttgaaggccttaagaaaaagagagattttgcccaaggaaaggggaattctgctagtagattgcctttggatctgaactacaacatcaacccttccctgagtctccagcctaccagcctgccctgcagatttaggacctgacagcctctacaatcatgtgagccaattctatgagattctctctctctctctctctctctctctctctctctctctctctctctctttctctctctctctccatccttagaggacaaaaagaaattagcctttgccagtgtaggtgctgtcataatgacactgattcaacacatgccttttccctgcaaagcctgaaggcagggtgcctcgacacccggcttaggtcttctcattttcatgaaagatatgttgcatgaaaaatggcattctgaggctcgtcttgctctgagtgaagactactctgagaatcagaaaacgaaacactagccagacatggcaaaaaacaaacaaacaaaaaatcttaattgctcgaattgccactgaaaccaaccttccagagaattgcctgactctaaaattggaaggccacagaaaggcagcaagcaggttgggaaccaggtgtgttagggggttttctttcctgcatttcattgttttaaaggcgtcttgatccatgggttgcaatatggctcaacctgtaaggagggagaggtgagaggtcagccaccctctgctgtagggagctgatgtttccacctcttacatttcgatgagcaagacattttgcttcttcatcccccaaaaggaagaggtgaacaggcgctggagtgttttgactgaagagtctttggtgttccctttctaataaagggccatatattagtgccgaacagtcatttttttgagcactaaagtaataccagtactctcattgctcaagaaattgctgagcaaaatcttccaacaatgtgtctccccggcattccttaaccctattgataatgataaagtctcataaatctaggtaaatctttaattacgccttcagaacgtgacgatattatgaccgtgatatagtcataaagggcacattcaaaattagctcggtatacattttatgaatatgtaaaagggtagaggtggtgagagttcaaaagcaaagaccaaaaaaggatgtattttttcttttttgttgcaatcatctgttaagacgggatcttattttcttttttaagataattgtaggaaaaagctctctttcttgtcttgtatagtttttattaaaatccaaagcaccaactttgtgaagagccctatttcatgttacaaaaactgcgagattaaatagagggagtattttcttctgtgttgaaacaccttttggcctaaaaattgttcgtccttgtattaaatgtgtgtgaaacatttatggagagaggcatttctttgcactgttttactgaggccgtaacaaagcttagagtttgtttcatactctacaatcagggtgattacagcctcatctgtctcccacccctgcatttggttagtagccctatgcaatttatttttatcttcagccaatgcatatatttttacttgtgtgaataataggggaaagattaagttcttttattttgctaattaaactgcatttttctaaatctcatgaggtagtaagtgacagaattaacaggagcactttgcagagttttgctattttcctgattagattagaggtatttgatattgaagtcagagctgatgaagtggtttcctcgatgtgaatgaatgcatgaccctagtttatcaccgcggcttcataaagaagtcttccttactgtcaagaaagcccaaccaagagtgaaaatgacattagcaaaaagctaagcaaaaggtcagcagagcagaatgagaagggagaaggaaaaaatgcattcctctgcctctttatttttccccccaaggggttaaggaagattgctcagttacaacctctgtgctgagcagagcagggtgagcctcagaactgtaccctcctgagacagggacacctttctcagcctctagagtttgaaggtaaaaattttatgttaaaaaaacaaacaaggaaacaacaacaaaaaaaaaaacacaaggggaatagaaatgcagagcgaggaaagctccagctctcccttcccttccgccagtggccgccatgcagacttattcccataagcatctccagactcctttgggctatcctgggcctcctccggagctgggcttaaagctcttcttcaaggcagccaggggccaactgaaggcaataagcaaaggcaacttctccctcgcttcctcacaccttcccttcctcacaccttcaagctccccaaccccagcttcctagccccttaggggagggaagtaaaatgaaggagtgatgtcagacaaaccagaggggaagatcagaataggggtgtgctttgccaaatcctctatggtgaacagaggaaagacattgcggcagggatgaggaggagcctgcagagggagctcagtggagtctggaccatgcccaggactgggcatctttcaatggtaagtccaggcaaggccattgtgtgtctatttgttacatgattatccccttcttctcttaatccctaatcttgtcttccccagagacacattattttctttttaatcaaggtataatttgcatatagcaaaagacacataagtgtagagacagatgagttttggcacatgcacagccacgtgcaattcacattcctattagaatataggatgtttccatcaccccaggaagttccatcattatccttcccagtcagtgcctgccttcccacccatccaagcaatcactgttctggtttccatttctaactataaattagatttttcctgttctagaattttatagaaatggaattctacagaatgaactcttttgtatctggcttctctcacccaccacaatgtttctgtggctctctgttgcgcataaccataggccactcatttctactgctgatttgcattctgttatgtgattctaccacaatcttttcatctgttcttttaacgaatgttggggttccttccggtttttacccattatgaatcaagtcgcggtgaccgttcttgtacaagtcttttgcagacatatattttgattcctcttgagtaagtgtgtaggagtggaattgctgggctctagggtaaagagtatatttaattctatgagaaactactgagatggtttggctatgtccccacccgaatctcatcatgagttgtagttcccataatccccatgtgtcacgggaaggacctggtggaaggtaatagaatcatggggggcggttaccctcatgctgttctcatgatactgagtgagttctcacaagatctgaatggttttataagaggcttttcccccttttgctcagcacttcttgccactgcaatgtgaagaaggacatgtttgcttccctttcccccttctgtcatgattgtcaagttttctggggcctcccaagccatgctgaactgtgagtcaattaaacctcttttcttgataaattacctagtcttgaatatgtctttattagcagtgtgagaaagaactagtcaactatcaaactgtttttcaatttggtttcaccatttttcatttagccaacaatgtaagagagctctgcaacctgtttattccatatcttcaccaacatttagcattgatagtcttttaaattttaagtatttcagtgattctgtatagctttccaaatatggttttaattttcatcctccttctgatcactttttatatgctttttatatgtcattcaaatatctttgtgaagtatttgttcacacgttttgcctatttttaatggagttctcttattcttactgagttgtatgaattccttatatattctgaagaccagtccttttccaaatgtgtatattacaaaatcttttttcttcatctttagttgccaactaatatattttattcttttattaacatgcagtaaattgagttcttttggggtacacttctcttacttttaacacatgtagagattcatataaccaccattacaatcaggacacagagcatttgtgtcaccccaaatgactctaacctttgtgggcacatgctccccacccataacccctgggaactagtgatctgttctctatcaccatattatagtttttttaaaaaataaataaacagaacaccatataaatggaatcacaccatatgtaaccttttgaggttgacttctttcactcagcatctctgagatttttccaagctgctgtatgtatcagtagttcattgatttttattgctgagcagaattgcattgtaccaattcacgtttaatcgtgtttttttttttaataagcagaagcttttaatttggaccaagtccaatttatcagttttctctgttatggtttgcagtttttttcattacatataacacatttggccactgaaaggtagtcaaataatatattctcctgtgtttatttataagacctttatatatagttttagcttttacacttaggtctataatctatcataaattaatttttgcatttagtgttaggtagggtttagtttttattttttcagtatgggtatatctgttttttaaagcatcatttgctgcaagactgcccttttctcattgaattgccttgcagcttttgccaaaaatcagttgtgtgaatttatttctggcctctgtattctgttcacttaatctatttgtctgtttcacaccaatgcaaactgtcttgataactttagtttcacaggcagtcttaaaatcaggtagtgtaagttatttaactttgttctctttaatattgctttggttattctaaatcctctagatttccataaaaatttaagattcagcttgtcaaagagaagtctgctggaatttctatttggatagcagtgagttaaatttcggagatagaatattacagcaacattgaatttcaatccatgaacatggtatatatctcttcatttatttaggtcttctttaatttttcttggtgcattttgtacttttcagtatagaagccatacatatattttcttaagtatttttattttattttatatagtattttaaatttttattttctaacttttttgctagtatataaaaatgcaaatgattttccagaattgatcttatctctagtaactttgctaaattcacttatttctgactatttacagattcttttggattttctacatgtacaattctacatgtataaataattatagttttatttcttcctttccaaacccgatgaattttatatatttttctgcctattgtactggctaaaccctccagtacagtttagcatggatgtgatgaaagtgaatttttattgcttgtttttgatattaggggaactctatcagattgagaaatgttccttctagtcttctttcacaaaaaagtttttttatgaataagtgttgaaaattagcaaatgctttttctgcatttattaagttcatcatatggttttttccttctttcattctggtaattctggtgaattagattaattttttaatgttaaaacaatctgatgttccattaataatccatttagtcatgatgtattatccatttttatgtatattttgttaagaatgtttgcatttaagttcatgagaaatactggcttgtaattttcttttattttaatgttcttgtttggttatttattagcattgagctaggttcatcaaaacaggggtgatgtgttcctttcttctctattttctgaaacagtttgtgaaaaattcgtattttttgaaatttgatagaattcaaaagtgatctaatatatgagtgcttttgataggaagagtgtgataacaaatttaatttatttaacagatacatagctaatcagtttttatgttctgtgtgttaattttggtaatttttatctttcaatgtatttttcaactttaagttgttaaatattagatataaagttgttcatagcattcccttatttatacttttaatgtctgatttatttctagtgatcatcctttttattaccaaccctggaaatttgtgtttcccctcttctgtttttaattaacatagttagtaattcatcaattttcttaatcttttaaagcaaacaacttcttgttttatttattatcttcaatgtttgttcaatttctgttcactgttgcccttctactttcatgggttttatttacttagtttttttcttatatttttaagtttagtgcattgaattttggcactttattttctaatataaacttttaaggcaatacattttcctctaagcattgctttggctgcatcccctaaaatttaataggttgtattttcattgtcaattatttttaaatatttctcatttcccatggtgattttttccttttgatgagtaggttatttagaagtatgtgatttattcccagatatatgaggattttccaaatgtatttgtcattttttttttccaattttaatttcatattgtcagagaaaaaactctgttttaaatcttttgaaatatatagagatgtgtattttagtaccactagttctatcttggtgaatgttccagatgcactaaaaaaaatgtgtattataaagttgttgggtgtcacattctgtaaatgtcaactaggccaagttggttaatattgttcttaaaatctacttactctatcaattactgaggaagaagtattggaatctccagccataactgtgaatttatctatttctctttttagttccttaagtttctcctttgtgtttggaaacgttgttgttgtgtcaagatattgttagtattgctattcttctttttaaattacccatttatcatcaaaaaatgaccttcttaatacaagtaatagccttttctctaaatctctgtgtctaatattaatagagccatgctagatttcttatgcttacagtaagcatagtataaaggaagagtgtttttcttgaagtagcatatagttacattttgctctgttaccaagtctcactatctatgccttttaattggattaaagtttgggaaagcttaaatggctggaacttaaaagacaggtcattaaagaggaacttcacagggaagtaacccaagcaatctacgtagatgttccctggagtttttggcagaattctaagacaggcatgcacatggtatcactttacaagaccttggaggggggaaagaaagctacaagacagaatgtgaactgaatgacaattccagaggatatatagcactgggagtcataggagatttattcagccaggacagagaaacccctctaaatattccaggaattcagttgagaccccatacaggccacatcttcaaagcagtatatttcaatctcggaaaaggaacaacttctctcccactctaacaaagcctaaaaacaaatcctaacatgatcaaactgatttcccaataattatctataaataaaactcaacactctttagaccaagatggcaaaatatattctcaactatgtagcattcataatattcagcacacagttaaaaaaatcactagatatgcaaagaaagaatattttacctttatccagaaaaataaataaataaaacttttctgtagaaatcgactctgaaatgacacagttattgaacttaggacacaaggactttatagaagccattataaatatgttcaaggatttaaaataaatgtttaatataatgagtgaatgagtgggaaatctcagccaagtaataaaagctatttaaaaaaaataaataaaaattctagaataaaaaaaatgtaatctgaaatgaaaatttcactggatgcaattaatagcatattgaacaatgtggtagaaggccagtaaatttgaagatagatcagtagaaactatcccacctgaagcagtaagaaagaaaataccaataaattagtagagactcagagacctaagtaattcaatcaaatggtttaactgggatgtcagaaagtgaggaaaattgggagagaacaaattatttggaaaaaaatgactaaaatattgctgaactttatgaacaatatcaacacggttgacactgaaactcaacaaatcataaacaggagaaacataaagatatatgtagacacattacagccaaattgctaaaaatatttttaacacaaaaaaaatcataaaagcagccatagataaaaatcatttaacatacaagaaaaaagcaatatgagtactgctaatttctagtcggaaacaatgcaagttataacacaatggaatgccatattttaaatactgaagtaaaaataagtcaacctagaatcctatgtccagtaaaactatccttgaaaaatgtggtcaaaatgaagacattttcatcaggcttcccttttgcccccaaagtaattggctgaagggaaataacagcagatgtacacttagtccacatgacagaaggaagagagggaaaaaaatgtcaatataaaagacatttttaatttcagcactttggcaggctgaggtgggaggttcacttgtggccaggattttgagagcagactgggcaacatagtgagaccccatccctagaaaaagttaaaaaaaattagccgggcatggtggcacgtggctgtagtcccagctatttgggaggctgaggtgggaggattgcttgagcccaggaatctgaggctactgtgagccatgatcgcaccactgcactccagcctgggagactgcaccccagcctgggtgaccctgcctcaaaaagataaattttatttaaaaaatacatttttcttcttttgtatcttctttataagatatctgactgcttacactgaaatgataacaatttattgggcatataacatataaagtaagatacacaacaataatataatggagatgtggatagaaatgtactattggaatgttcttcattatacatgaagtacatggttttagttcatggagcactgaaacaagttgagaatacataatataattcctagatcagcttctaaaataataacccaaagaagcatggctaaaaagaccatggaagaaacaagatgaatattaaatatacacaattaaaccaaagaagacaggaaataagaaaaaggggaacaaaaagcagaaggcacatttagaagaagaataacaacttaataaaagtggccttttgggggtttcaaccacatgcctgtgatgtttattaagaaccaattactcttgggcagaaactgagtaaatggagatctcacctccaatgtatgaaaacagatgctttgtaaatttcttccagttttatagctgtttatagtgggagagtaagtctaataccctatactctgtcaaggtcagacctggacattagtgcatgatttgcacttaatagatgtctttgctaatcctctttcactatgtttacttatattttatttctggaaaaatatagcactttggccctttaagttctgttagtattgtagtatatttctcaatgtatttcttatttttatcatccaacattgttttggggccaactttatttctttgcattacagtgtaatattccaccacctatgtaaactgcactccacttatcctttttacttgctcattagatgccaagcaactcttatgttgacgcaaacaacactgcagaggaaatcgtgaaatatatccctggggtatataaagttgcacactttctttaattggatttaatcggttaacatgacagtttttaggatgactcctttttgatgaaaacagtagagaaagtgtaaaccaaagccagggagatgcgtggagaaggtgattagtgggagaagcctttgctgtatgtctgtccactactatcacaatcttccaatgatgcaataggtacctacaggggcctcccctaaaatcagagcccatctgcgaccctggtttttcccagtgcctgtgtggcacagggaggcctcatgttgctgatgaaagggagacgtgtgaaagagaaaggatcttctcttgtcattgctaagcctgctctgccttttttttctgagcattttttcatgactccaagtctgtaccagactttcccatacatatgacgcgacatatctggcctctgtggctccagtctgaaattttctttcactcaagaatcctttaaactatttcagtcatattttgcaggaagcagtctctgtcagtaacaaatatccaactccatcacctccacactcttattctccttggagaaggaagccctctgtggccatgtccccagatgcccactggatggtggctgtcttgatggatgagggaacaatctcaaaagacttgaatgccacagccagtagcacttaccaaatgccaggcatgttccaagcaggtccatgaattatgctgggtagacaacgtggcacctaattacctgtgtcgcgatcctgcatgttatacttactagttgtgtgagcctgagcaagctgcttaacctctttgtgcctcactcttctcataggtaacattgtgagaatcatctttatcccttagggtttttccaggacagtgcgagcctttgtaaaggacttaaaatctgtaaagcacacagtcacatacattatgatgtggataactggagaaatgcattattttctttggaaaggagaacaaatactgttatcataatgtatttttgttaatttttttggctggaaaattggcaatgcaattttaaggttagcttaaattcactggtaagaattagtagaaattttttagaaaaatagtaatgttttctggttcaatgaggagcttgctagttgctactctatcttaacaacatgtaaaaagctgaacaaactggaaaataaacagctcttcttagatcccaaagggaagtgagttcacaggacaaatcaccgaccccaaaattagagacagataagcaaatacagagaatcacaacttactagatagaaattcatgagcagaacttctgaaggaatcagcgccaaagtcgggaaatctgaactgtaattgatgacttattggagtctcagtgtggataaacctgagagttaaaaactctaggtggactagtcattgggtatccctcacaattaagtgagttttaccccctggagctggaccaggttcccacactgaatactggagaaaaatcccctcatgcttctggcagaaggaggtgaaaaacatctaagagtgcatcagagcattctgttcttcttaacaaggtctgcccttaggagaaactattcaaccagagcctaacctgctagggttttatcagaacttatctcacctggaagaaaggaaatacccaactccacaccattgcagccatcctgtcccatctaagtggcagtggggtggggagattgagaagcacttgagaagttcacagtccagaagcagaggctcattagaagactgagacccaatcacaggtctagagaatgcaccccttctccctgcaccttactaccactttactaaaggcctatttacagcatttctttttatccagtacatattgaccagctatcaagagaaaagtacaaggcatactaaaaagcaaaacagtgcagattgaagagacacagcgagtgtcaaaaggagactcagatatgacagaaatgttggaatgatcagatcaggaattgaaaacaactatgattaatatgctaagagctctaatgtataaagtggacaccatgcaagaacagacaggcaatgtaagcagggagatggaaattctaagaaaaaagaaacaaaaagaaatgctggagataaaaaacactataatagaaatgaatcacgcctttgatgggcttgtagtaaattggacatggctgaagaaagaatctctgagcttcaaaggtatctcaatagaaacctccaaaattgaaaagcagggagaaaaagaaaaaaatgggggggaagcagagaataatatctgagaactataggacaaatataaaaggtataacatacacatatgggaataccagacagagaaaagaggagaaaggtacagaagaaatatttaaaacaataatgccccaaaatttcctctcaaattaatgtcacacaccaaccacagatctaggaagctcagagaacaccaatcaggaaaaatgttaaagaaattacacctaggcatataattcaaaatacagaaaatcaaacataaagaaaaataattccccaaagaagccatagggaaaaacaccttacctatagagaagcaaaaataagaattatctctgacttctcctcttaaactatgccagcaagaagagagtggactgaaatatttaaagtgttaagagaaaaagaaacatcttaaaattctgtaccctgcaaaattgcttttcaaaagtgaaggagaaatagactttttatacaaaccaaaatgtagggattcttttatttatttatttatttatttttgccagcagacctgccttgcaagaaatgttaaaagaagtgctttagagagcagggaaattctataggtcagacacttggatctacataaaaaaaggaagaaaccaaaggagaaataagtgaaggtaaagtaaaaattttatttttcttacaacaaatacatttattcaaaataaaaatagcaaaaatgtatttgattatgtatgtgtttttgtatacatgcatacataatcaatatagtcatgtgtatacagacacatataatcaatatagttatgtgtctcttaacaatgaggatactttttgagaaatgagtcagtaggtgattttgtcattgtgtgaacatcatagtgtgtacttatacaaatctagatagtatagcctactgtacacctaggctatttattatagcttattgcttctaacctacaattctgtacagcaatacagtattataatattatggttgaccaaaacataaggcatgacattgtgtgtgtatgtgtgtgtgtgtatgtatacatgtatatatttatatgaaataaatgaaaacaatgacataagggacgggaaggaagaattaggagtattttgttattaaagtattcacattatccatgaagcagtatagcagtatagttacactacagttattatagttatttaaaagtggacttggattagttgtaaagatatattgcaaactctatggcaaaaactataaaaagaaaaagaaatataactgatacactaagaaaagagggaaaatgaacttatataagtttttcagttaaaatcacaaatggcataaaaagactgggagataacaagaacaaagggaaagagcaatgattggtaaacagcaatgaattttgcagacattaattaaactacattaataatcactttgaatgccaatggttaaaatattctcattaaaacagacacattgccagagtggatcaaaaaatgaaatccaactataggttttctagcagaaacccactttaaatacaaagacacatctagattaaaagtaaatggatggagaaagacataccatgctaacactaatcaaaagaaagtgggagtagctatattaatttcagatagagcaaataagctatcaggaataaagaatggcattgcataatgatgaaggagtcaattctccaagaaggcataacaatccttagtaaagttgtgcctaacagtgcatcaaaatatatgagctaaaaatgggtagaactgaaaagaagaaaaaatgaatccaatattatacttagagacttcaacactcttctatcatgaacgaacagacctagcaaacagaaaattagtaagaacacagttgagctcaacaccaccatcaatcaactgtatataattaatatctatagacagcttcatttagcaacctcaggatatacattcttctcaagctcatatggaaaattaaccaagatagaccacattctgggccataaaatacaccttagcaaattaaagaaaatagaaatcacacattgtctgctctcagaccacaatgcaattaaactacaaatcaataggaagataggtggaaagcccccaaatacttggagattaaacaatacacttcacaataacacatggtcaaaaaataaatatcaagagaaatttaaaaatattttgagataaatgaaaatgaaaacacaacttataaaatttgtgagatgcagcaaaagcagtgcttacaggggaatttatatcattaaatgcatatattagaattagaaaaaaagaaagaaccaaaattaatcatctaggcttccattagagaaaattagaaaaagaagaacaaattaagtctggaataaggagaagaaaaaaatgaaaattagaagagaaatcaatgaaattgaactcaagaaaaaaaaaatagagaaaatttatgaaaccaaaagtatgtttttagaaaatataagtaaaattaaaaaccggtgccccagctaaccaaggaaagacaagacacaaattactaatattagaaatgaaagggggcatcactatcaatcccatggacattcaaagcataataaagaatgattataagcaatctatgtccacaaattggtaacttagattaagaacctattatttgaaagataaaatgtactaaaactcatataaggagaaattgacaattttaataggcttatatttattagcaaaattgaatcaatatttaataattaaaaacagaaagcaccagctctagatggctttactggtgaattctatcaaatatttaagagaaaaataataccaattctgtagactctgtttcaaaagtagaagcccaggaaatattgtctaactcattctgagcagcccgcattacatttatactaaaaccagacaaaaagacatgacaataaaagtaaactacaaaccaaaattctcatggacatagatgcaaaaatcctcagcaaattattaaaaaattgaatccaataatgtgtgaaaataagtatggaccacagctgactgggatttatccctggtatgcaaaaacagttcaatatttgaaaatcaattactgtaatctaccacatcagcaagctaaagaataaaactcacaagaccatatcaatagatgcatacaaagcatttgatcaaatctaacatcacttatgataaaaactatcagtaaaccagaaatagagggaaacctcataaagaatattcacgaaaactgacagctaatgtcatagttaatggagagaaactcaaagctttcccactaagattaggaacaaagcaagaatgttgcctctcaccattattttcaacatcatactggaagtcctacctgatgcaataagacaagaaaaggaaataaaatatataaatgatgggaaggaggaaatgaaattgtctttttcacagtgacatgattgcctatctagaaaataaaaagaagaaaagtactcctgatactaataaataattataccaaggttgcaggataaaggttaatacacaaaagtctattgcttttctaggcagcagcaatgaacaagtagaatttgaaaataaaaacaaaataccgtttatattaataccccccaaaatgaaatacatagatataataaatctaacaaaatatgtacaaaatctatatgaagaaaactataaaactatgttaaactaaatcaaggaaggactaaataaagaggtattcatattcatggatagaaagatttaatattgtgaagatttcacctattcccaacttgatctatagactcagcacaatcctaatcaaaatcccagaaggttattttgtagatattgactaactgattctccgatttacagggagaggtaaaaggcccacaatagccaacataatattgaaaaagaagaacaaagttgtgtcactgacttctagacttactgtaaaactacaataatcaagatgatgtggtatcgtcaaaaaatagacaaggcagtggaacagaataaaaaccccagaaatagacctataagaatatagtcagggccacgcacggtgactcacagctgtaatcccagcactttgggaagccgaggcaggcggatcacaaggtcaaaagatggagaccatcctggccaacatgctgaaacctcatctctactaaaaatacaaaaattagctgggcatcgtggcgggcgcctgtagtcccagctactcaggaggctgacgcaggagaatcgcttgaacctgggaggtggaggttgcagtgagccaagattgcaccactgcactccagcctgatgacagagcgagactccgccaaaaaaaaaaaaaaaaaaaaaagaaaagaaaaaacatagtccgatggtctttgataaagtaccaaagaccataaaatagtaataaataatcttttcacaaatgatgccaagacaacagaacatccacatgaccaaaaaataaaataaaataaaataaaatctagacacagatcttacattcttcccccaaatgaatttgaaaccactaaactcttagaagataccacaggagaaaatcgaaatgacctagggtttgatggtaaccctttagatataatgtcaaagggatgatccatgaaagaactaattgataagctggacttcactaaaattaaaattttctgttttgcgaaagacagtgtcaagagaattaaatgacaactcacaggctggaagaaaatatttgcaaaagacatatctgatagaggattgttatccaaaataaacaaagaactcttaaaactcaatgaaagaaaacaatgatccagctgaaaaaaatgcgccaaagaccttaacagacacctcaccaaagaagatatacagatagcaaacagtctataaaaaggtgctctgttccatatgtcattagggaaatgcaaattggagcagcaattacatacctctatatacctattcgaatggctaaaatgggtaacactgacaacaccaaatgctggtaagaacatgaagcaacagaaactctcactcattgctggtgggaatgcaaaatgaaacagccaatttggaagatagtttgggattttcttacaaaactaaacacactcttaccataccatcctgcaatctcactccttggtatttacctaaaggactcaaaaacttatgtctgaaaaaaaaaacctgcacatggatatgtatagcagctttattaataattgccaaaacttaaaagcaaccaatatgttcttgagtaggtgaatggataaataaactaaaagtctggtacatcttgactttggaatatcattcaaggctaaaaagaaatgagctactaagccataaaaagatacatagaaaacttaaatgcatatcattaagtaaaataagccaatctgataaggctacctactgtgtaatttcaactctgacattctggaaaaggcaaaatgatggagacagtaaaaagatcagtagtgtccagtggaggaatggaggggaggcaggcgaacagacgaagcacaaaggatatttaggggagtgaaacaattctgcacaatactacgatgttgcatactcattaggcatttccctaaatctatagaacacgcaataccaagagtgaaccctcatgtaaaatatggactctgggtggtgacgatgtgttaatgtaggtttatcaattgtaacaaatgcatgcaccaccacagtgtgggctgttggtaatgggaggctgtgcatgtgtgtgggaaggggggtgcatgggaaatctctgtgccttctgctcaattgtctgtgaatccaaaactactctgaaaaatgaagtttattttgaaaaaaaaagaataatgatgaagtgggctttcaaataccacatattaaactgtactttaaagcaagtataattaaagcagtgtggtgtcaggggaaaaaaatgtagacaaatcagttaaaaagaagaaaatctcgaaaggatcccaacattgtgacagtgtcgtgataggtgcctattgaatatttatgtaataaatgaatacagcttagtacaacgttaaaagtatcatttcaagacagtaggtaacagaaaattactctacaggtaggtctggggcaaattgtaatcatttgatttttaataatggttaaattattctctcaccctgtactatcgcccaaatacacacacacatacacagatggatgagaaagttataaaatgacttaaaaatatcaatctcttcgtgttgattaaatgttcatgttaaatctaaaaacaaagggagccatcaaaatcaaaaagagaaaaagcttaaaagatttgtctacataaaaataaatacataatgaatgtcatattgctaaaaaaaattcactatgtttgacaagttgattttcttgataagtcatagaatttaatatggaaatatcaatgattttggggaaaaaaactgactaaaggaataaataagccacactacaaagaagcagtctacgtggccatggcatcacagcttatgtctaatcccctttgactagagtgcaggagtgtgtgattaaactgagcaggaactaatgtgggcttcacgagtggccgccactgtattcattcaactgctgggtggaagagcggcttccctcttccttcctcagaagaccagagatgatgatttaagaaataaaagttggaaatgtcttatttcaagtcagattacaatattaaatgttagaaagcactgagatccagtttttaatggaaatatcatctattgccattatttgccaaattaaaaacccataaaaagtcatggctgggcgcagtggctcatgcctgtaatcccagcactttgggaggcccaggtgggtggatcacctgaggatgggagtttgagaccagcctaaccaacgtggcagaaccccatctctactaaaaatataaaaattagctgagcgtgctggcggtgcctgtaatcccagctactcgggagactgaggcaggagaatcgcttgaattctggaggcggaggttgcagtgagctgagatcgtgccattgcactctggcctgggcaacagagcgagactctgtctaaaaataaaaaaaaaagtcatgatctttgagaaaaattagagaaaaagataagctaatgtagaacaatttactaaaataattcacaaaaaaataacaatttagaaatcactaatgacaacaccaaagcatataaaattgtaatttcccaggaaatacatgtagatgtctagatatcgctgtatgtatatgtatatttacatacataatacatatatgtgtatatcaatatatgtatatttctttttttaaatgtgatattccaagctatttgctgttttgtaattttttcaattcatataaccattttctatttaaaaagagttctactcctctgcattttaaatgccaagtaatactccactgtttgtgcagaccataattttttattacccaatcattattgggtagttagatcacttccaattttttatatttgatacaacactgacctgcctgtggttttgctcaacattcatgaacacacatgaaattttccaagggtaaactcttttttaagcccttaatatatgttgccaaattaccttctgaaaccttctacaatagactctcacctgaagtgggagggatatttttaaagtcagtacatataatacaaaatgctggtcatcaaaattgccctggcacatcttttaagaaaatagtgttggagattgacattcagtaattcatttgttcatgcaacaactgaaacactgtttattgagtaactagtctgtgtcaggcatagtgccaggagatggagatgggacagacaccgaactagaccaatatattcactgtaaaaagctattctggtggagagagagaatgaaaattaagcctaacaatcacaaaatttctaaagcattagaagatgataagtaatatagaaaaaaaaaagactaggcagggctaaaagagaagtatgtttggaggagggtgccatagaggtttagatggtcaaaggaagctccattgagaagaggtgacttgaagaaagtgagaattgagctatgcaactagctggtggaagggcattcccagaagaggaaacaccatgtatgaatgccctgagaaggaggcacaattggcatgctgaaggaacaacaaggaggtcggtgtgtccaaagaccagtgtgtggcaggaagagtgaaggataggaggagaccagagaggtgagctaggcagggcattgggtggatatggactttttcccagaaaggaatggaaattgtggagcatgtttagcaaaggcatgacatgagtgacttgttttaaaggatctctctggctgctccttagaaaacagactgtagggcacaaggtgggggtgggtagcaaggagagccatctttgcagttcttatgctaggagctgttaggctttaggggacatctggtatgagaatgggtccttaaacatgagtctcagatccagccctcgggacggtcacaccacacagacccagtgaagaaacagctctggggagaaagcagcaggatctcccctcaggtgctcactcctgagcacacacacagagggaaacgatgggtggtaaggcaggctttaggtacatcttccttccttctgcccttccttccttctttccttttctcttccctttcttcttccctctctcccttcctttctttcttctcccctctcttctctccttccttccttcttccctcctgtattagcctgttttcacactgctacaaagagcttcccaagactgggtaatttataaaggaaagaggcttagtggactcacagttccgcatggctggagagacctcaggaaacttaaatcatggcggaaggtgaaggggaagcaaacaccttcacatggctgcaagagagcgaagtgcaagcaggggaaatgccagatgctcacaaaaccgtcagatctcctgagaattcactatcacaagaaaagcatgggggaaactgcccccatgatccaatcacctccttccctccacatgtggagattacaatttgagatgagatttgggtggggacacagagcaaaaccatatcatctccctttcttccttccttcttcaatcccttccttccttctttcctctcttcttctcttgctccctctcttccttccttttttctttcctcccttcctccctctctccttttctttctttccctttcctccttccctcccgtccttcctctcttcttctttctttcccttcccttccttccttggtacctccattcctccttccctacctccctctctccttctttctttcccctttttgggggaggggtgtggtggacaaatgcagagttaaaattatgtaaattaaatttgtcaaatatatcactccactgtagcaaatttcattactgcttgtacctccttacacttaccccagccatgagtagaatgttgttgttattgttgttttaatctttagatgtgtgtagacagaatgttaagttactgacaatgctataggcattgctttgtttgctagtgcaaaggatcattttttcccagcttcttggctgtccatgtttccgtcctgagttgtctttcctgcactttgcaggcatggaaaccttgttccacacattgcctggtgccctgtccagcgctgcaaggtgcactgcgtctcctctgcccagcaagccacaagcccctccagggtgagaggagagccttcccttcccttggtcctcccttcgacacagggagctggagctggacagccccataggcactcagtaagcacacaccatgtagataagttaacatgtacctttgaaaaggtggatcacggggattttgtaatgatgcagcagcgaggatgctttgaggatggaacttggggtctttcaagttctcagtagggctgcgatccttcctggactctagttgtatcctgcagaggtgtaggagatgagccagtgaggtgccattctggagaggttccttgtcggctgttcatgaacacaattgctctttcacagctatcagtccctgagcagccacccttcaccaggtttggggccaagtgccttacacttgttaccttatgcaattctcaccctaagcctgcgataccacaatttttataatttatcatctacaggtgtgaaaaccaaggtggaacattttagggactctcagctagtaagtggaggcttcctttcctgccccttttttattccattatggacagagctgactgtatctctgcattcactgcaagtctgcgttgctccctcaatctttgatccacttctttctcctgaagggcactgaaatactggccgtttatggctcctgaaacttgggatgggaggacccagagagctcttttcaccaagagtgtgacctcagcagctttcattccttcctggccccagctggctctgggctgagcccgcttcaccagggagcaccatgtgaagatgagtctcaacctggagtctgccatttgtttccagtccttcactgccattccaaagagaggaatgactgcccgaccctccatctggggcagactcagcccaaaacagaggctgttggcccctttccccacctctcagctccttagcactttgaatccaatcctactctttggaacttagctgataaatacaaggctgccttttccaaaaatgtttctgaatagacaaactagaaactttataatttggaaatagtattcaaatggctctaaagacacatctagggctatgttctattcttggggaaattctagagatacatggttggctggatggagggatgaatgagtgggtggatgagtaggtgtgagtggatgaatagatgggtggatggatgcatgcatagatgaatggatggatgaattgatgggtgagtggaagataaatgaatagatggatgggtgaaatggatggatggatggatggatggatggatggatggatggatggatggatggataaatgaatggatggatgtgtgaatggataaatggatagatcgatgagtggacagatgaatggatgactggatgaatgaataaatgggtggatgattggatggattaatggacaagtgggtggattaatggatggatggatggatacgtagatggatggatgggtgaatagatgggtgggtggatggatggatggatagatggatgagagaatgggtggatgggtgtatggatgaatggatggataggtggagagatggatggacagattgatttctctcactgaacaagtaccaacataggcaaaagcaaagcaagagacaccaaaagcatgttttattttgggagaaaggaaagtccttggaaacacaagtccaggcctgcaaaatccttgggctgcttcaccattctgggagcagcaacatgtccttcagctgtcttatattcccttctccagcaaggacataaggacacgataaatacttaaactgcagcaagaaaatttcaagttattctttaaaaaaaaacttttgaaatagccatttgataatagtagacatcagcccctaagtagaaagaaatctatttttcagcatttaattcatacaaaatcttccattttcaataagcattaatttaacacagacaaaatggctatagggtgacagaatctcatctctatatgtagaagatttttaaacaaaaagccacgtttatattttattgaattccaggggcctgaaggcaggtaagttgttgggataacccctgcaatctgccccaactttctagtgttatagaagaaacaatattgaggaaagtcctaggtttccttttctaatttttttagtcttgcaacattaactaacaagaattttcttccaaaattgcagaaatttttctttaagactaggcgggaagagtggaaataaaagtcaaatctaaaacctgcaaacataaacctggagcaggcgagagaccattattgctggtgtctgttctcagctatagaatcattaacatgaaataccttttaatgaatgcattgaaaaaagtgattatatattaaagtacaaaagtctattcctgcaccatttaaattactttacaatgctgattaaaataacagaacattatagcttgcttagctaaccattatatttccaaatccatttccaattgtttcccttcaatttgaacaatttttgagcaattttattgctattcatacctgcttgattttttattagaaattaaaatacacaggttttttatcaatgttgtgaagtactgcaaagtttaactcttttgatgccattcagaacctcaagtcacagggagaagcaactttttttctctcttaattccaggggcttgaagaagatatctagaaatgtcaaagcagaagagcctcggagataatctgaactatttctgagtttatataagggaaaactgagactggagagaactaacatgtctaatattacaatggaaacttgtaataaaaccacaaattgagtcaagtctcctgattcactatatgagcttcttttgactctaagaaactgtccttcacaaagttcccaagaaagaatggattggccagatcgatagaggaatttctgaggaaactgcacttgtgtttttatatacttggcacttattcatgctaaacagtagtttagtgcagtggtggagaaaagaatccctttgaatgatacctgattaatgtgtgtataaagcacacaggcctataaaatagtgtggaatatgggacaagctatcttgatgccaagccatggaatggacctgtgtgttacccaggacaagctccttgttctaaaacctttatcataagtgcaacgaatgactgcctttgctgattatagaaacctctgtcctgctcgtggcaacacccttagcaccaagcacagagcctcacacagagaatgtgttcaagaactcttcagtagataaatgaatgaatgttcctccatcatatggagttttggggtcccaagcaacaaaaatagatgctagttaacgtgaggaggatatgaattggtttaggatatcaaagcaaaagctgaattaacaaggggtcctggaaagttgggggctgagcagctccaggcctctagactgaagaaagtaatgaggtctctttgggcatcctgctgggataaaccctctttaataatttcccatctttgtcttcctcatcttaacattcaggctcccaagaaagagagtccaattggccgagcttttatcacacgcctgtctgttggcaagaagggctaggaaccctgcaatgtagttcatgaagactgtatacatggaaaagggaagtcaaggtgctagtattagaagaaacaatgaattgtgagcagataaaaacatcacatatccactgtacacttgagcttctccttctcctgtagagtgagtgtagcaatacctaacttgcagggtccttatgggaactggaaataggattagaagagtcatagcataattccctggcacatagcatggaacctatcacagctggttttatgtaggggcagtgaagacatggtttaccacaagtcgtggctttcccaatgctgattcctgaactgtggccacactgttcctctttcagaggtgtttgacaacacactcttccatgtgcagatcttacttaccaacgctaccttcattacaacatttcttcagccccagccataaattgagttgtggaaggcccaagccatgccaggattttaggacggctggggttggtatcaggtggagctgaggctaggaaaccaaaataggatgtgagctggacctgaaggtagtggagcagtcaggatcccgatgtctgaggtgtgtgatgagcagaaggccatgattgaggatctcaagaatgaccccagtttgccagacgccaggtccaaggccactgacagattccctggtagatttcaaatggactcaagagcctaaagacaaagaccttatgactccatgtagaaagcctgggactgagctgcccgtgggtgcccagccaggtgcaggggaaaaaaaagaatgctaactgaaaattaactgatagtctaaactgagcaatgagtttggagactccaattgcaaaagtaatgggaacaatgaaaagaagagtattccttgggactcagtgcagtaactaataattactggacacttgccatttgctgggtcccctgctagggagacaggacagagtagtgattaggggcacagatccaggattcagatcatctgggtttgaattctggctattccactgagtggttataggacttcaggccagtctcataacccaccctaagtggggatactaggagcagtttgtgcctgttggagcactaaattagatgattaatgtaatgtgctaagaccagagccaggcactgagaaggtgttcaataagcattaatgatctcattattgtcgtgttcgttgttaagcgtttggtcatgccttatctcatttagttctgagggtctgaggcagtgctaggaaagcatcatgggagacaggcatggtgggagctgagccctgacatgaatggggctaactcaatggcataaggtgtgggaatggtgtttgtcagcagttgggatgagcagtgatgccccttaggtgcagtgagggtaatcctgacttgagagatgaaatcctcaagggcccccaaccccttctccccattctgtggctgggtctcagccaaggtgtgtggagtggttgggtggggggttcaagtctaggaacaaagggagagaaggtcaggtcagtgagccatgtggaagcatgaacaaaagaaggggagttgattttgaaggaggtaacaaggcatagagctttttaaggacacttcatttgagagttagtggttggtagatgggagggtgaaggaaaggagaccagagtggaggagaaagggaaacttctgggaagatgtacttggggggatattccaagccaggcaaatgagtgcaggggaaatggaggtagggcaggtccagggaccaaaggtgaagcttggcctatagaggcacaggcctgggttggagggactctcaagaaaagcaggaatgggaaatcttatagtaatgtcaccaatgacataggctcaaaagggctttgcacctgtttttttcttcttgaaaccaagaagtttcctctcttccccacttctcgcctctgaatcactcagagatcagggctggtgacaagggccagtggcagaggcagtatgtttgaggagttcagaatgcctctccccaaagcaggaggtatatctagaaaaatgaagcctctgatctcctttcttctgtgtctcgggcctcaggctgcttccaggagcccagccatgcctggaacacgtttcatgagtgtctaggggttaacacttcaagaagaaacaggggagattttgctggtgtacactatgtcatgagaatggatctaacgagtgagaggaagctctgatcaagagctgaaaaacctgcacgattttcaactcaggaacccacgcgtaccaccattttcttctacgagaaacctcaacaggttacagatacataatttgaaagaaaacaaccttaagtaatgtgccattctagttaggtctaaattcacatttgaaaatattattcaactaattaaaatggaattaaatgaatacagtgttaactgtgtctagtgtttagcataaaatgttgttaaatatatcatactctgtgttccaaactggcggcagattttagcaatgtttaattgtaagaaatagccatgtactacttaattgcataagtaggtggaacataaaaatcacaattacatgaattatattaagtaaaatatgttaaaatagtttgtttttcgatggtggaattttatggacactataatgaaagtgaagtacatttttaattacctaattattgctattttcaaagtccatttacaccataattgttcctgttttcatagtccaaagagtccatgacagagagactcagtgggatctaaaataaggattcattcttcagacaactcctgctcatggtttccccctatctttacaaaatcgatctcagattcattcaacatgcattcaacaggtaattgtgtgtgtgaaattgctgggaatggtagcaggttgcagagatgagggaggggtagatttccagccctcaagcaactcatagtctaatgacagaggtaagatggactacagcagacgcagaagggaagcatggtcaggagttagagggacacaccaacttctcttgagcggatggatgcatgactgtgggctcctggacccggggaagaaggcaggactgggctagcctgggctggggcaggggcagtggtgaggaagggcatcccaggctccagcaaggacacagaggaaggaaaagcaggtggcatgaagtgttgtgaggcagaccagcccagtagcggcagacagccatgggcaaatggcaaaaagagattcagtggcaaagccagcccaggccagccagaccctgggagccggcagggagattccagcagtgaggagcggggagtgtggggtttcaatcagtggatttggggttcagcatgagccctttggcctgggggtgacaaagcaggagctgcaggaccctgagcactggaagacaacaaggccagtgacagcaacagaaggatcaagggaaaggtgatttaagtgaaaaacaataaatttgcttctggactgaggcgtgttgaggttatataaagatatccagggtagatgcttggaggcatgtttgctcagtagattgaggcttttaagccttttaaacaaacaaacaaacaaatccttgagagcacttttaagcttttctttctctctttttttttttcttttttgataccataggaaattttgagataaaaccgtgaaatgttagggcagtcccttaccacacatattgagttagtgtaatttgttaaaaagcaaaaaaagcaaagggtggccagacgccatggctcacacctgtaataccagcaatttgggaggccaaggcaggagaattacttgaggtcaggagttcgagaccagtctggccaatatggtgaaaccctgtctctactgaaaagatgcaaaaattagccgggcgtggtggtgcacacctgtaattccagctactcgggaggctgaggctggagaatcacttgaacctggaagtcggaggttgcagtgagccaagatcacaccactgcactccagcctgggtgacagagtgaaactgtgtctcaaaaataaaaataaataaagaaaaataaaaagcaaaaggctctcattatgtatcatcaggggaattaaaatcaaaacaacaataagatgccactacacccctgttaaaatagacaaaatcgagaacactgacaactcccagtgcttccaagagtactggggaactctgttaccggaactctgattcagtaccaatggaaatgcaaaatggaacagccacttggaagacagtttggtggcttcttacaaaactgaacatcctcttagcataccatcctgcaatcccactccttgatgtttacccaaaggagattaaaatttatgtctcacaaaaggcacatgggtgtttatggcaggtttattcataagtattaacacttgaaagcacccaagactgccttcagtaggcaaatggataaataaaatgtggtacacccagacaacagaatattattcagcactataaagacagaagctaacaagccatgaaaagacatgggagaatctcaaaagcctataataaagtgaaagaagccagtgtgaaaaggctatatatggtacaatttcaaccatacgacattctggaaaaggcaaactatggagacagtaaaaagattgactgggtgcggtggctcaagactataatcctagcactttgggaggcggaggcgggtggattgcctgaactcaggagtttgagaccagcctgggcaacatggtgaaaccccgtctctactaaaatacaaaaaaattagccgggcgtggcgtcatgcacctgtagtcccagctactcaggaggctgaggcaggagaattgcttgaacctaggaggcagaggttgcagtgtgccaatatcacaccactgcactccagcctgagcaacagagcgagactctgtctcaaaaaaaaaaaaaaaaaaaaaaaaaaaaaaaaaaatcagtggtgtccaggggtaaggagggaaggatgaataggcagagcacagaagattttaggacagtgaaactactctataggatactataatggtggatccatgtctttgtacatttgtgtaaacccatagaatgtacaacatcaagagtgaacactgacatagctatgtactttgggtggtgatgatgggtcaatgtaggttcctcagttgtaacaaaggtaccaccctggtgggggatgttggtaacggggtgattgcatgtatgtgtaagcaacaggaggtatatgggaaatctctgtatctcttgtgaaccaaaaactgaaataaagtctatttaaaagaaaaaaacgcaatggaggagaggagcagattacataaaaggaatgagcgtgctggcacttagcgcacgtttggtgcccagtcctcactctcattctctttagaataagtctacactctttcttctgagcctcgagctgcccctggagtttagacaattatcttcctttgaggatttgagaaaagttttcaaattgcgacaatttagggggattttattttttattttattcttatttctcactccttacttcttcctgcacttggaatcgttaacttgtgctgagtgtggccgccaggccatcactgctagaaaggacgagagattcttagcagtagtcagagagcacccgtcgggaccagtccttctaattctcaaaccaaatgaggttgaacaaacccgggtaagttttggcgcttccggctggttgttccaaatctttgaaagccctctgcgcactctccgtcattcatgtaatcatttaaaatatgtcttcctgtacaggaactgggtcccagccgcagggtaaccagaggctgcatgagtcactgtggttaagacagatcattgaattctcagctggcgtgacctcatagctgggaagccagagggcctgcgccagccaagaggagctagctttgctgatggtgtggtgcaggaagtgactctgccccatacctgagtcctttccataggaagtgagctgagtggagacaacagcagattgagaaagcaagaacagagtctttgattcttgagttttattcagctcagggaaagactgcattcatacctggataaggcattgcacctaagttgactgagacttatcactttcacatcccaggattaagtgtgggggtcctgaagacctatttcctaaagaatcaggcaggccgggcgtggtggcccacgcctgtaatcccagcactttgggaggccaaggcaggcagatcacgaggccaggaaatcgagaccatcctggctaacacggtgaaaccccgtctctactaaaaatacaaaaaattagccgggcgtggtggcgggcgcctgtagtcccagctactcgggaggctgaggcaggagaatggcgtgaacccgggaggcggagcttgcagtgagcggagatccggtcactgcactccagtctgggcgacagagcgagactctgtctcagaaaaaaaaaaaaaaaaaaaaaaagaaccgagcattcaaccctcatccatagaccattccctctttgccaaaaatgtaacaaagcaggaggggattaaaataaaatttttaaaaagttggcaggtaccaaatattgatacaaaaatgaagatattcggttggttggctatacatctccagtgtaggtgtttcaagcatttcccagacattagtcatttagataccacattcagaattgtggcgctatatcatgtcaatactaccctgtactcatatttttctttaatatgagtcaggtctttacttaaataaatttactcaaaaaggaaaattgctgtcactcactgggaagtcagaatcatctgtcataaattgtaaatcacacaaatgaatttaatgaaaacattaaattagaagcatctgtccacagagcacataaaataatcttaaataacatcaatgctatacaagtaaacaagaaacatcaaagaacatcaatggtataagtgtatacaagaaatatccatggtataagtgtagacaagaaatatcagaaatagggtaaaaatgtgagctttaaaaaactaaaactctgaagatagctggtcccaattgtgttgttttaaccataaaataaaatgattttttacattaataggaatatttacagaaaaaggttctaagctgggtgtggtggctcacgcctataatcccagcactttaggaggctgaggctggcggatcacgaggttaggagttcaagaccagcctgaccaacatggtgaaaccctgcctctattacaaataaaaaaattagccgggcatagtggtgtgtgcctgtaatcccagctacttgggaggctgaggcaggagaatcacttgaacccgggaggcggagcttgcagtgagccgagatcgtgcccctgcactccagccttggcgacaaagcgagactctgtctcaaaaaaaaaggtattataatttttttctatatataggatctatagtagagttttccaattggcttaaaaaaactattaaaaattaaattaaatttattattaaatattaaatattaaattaaattaaaattgttaaattttggaggaaaatcaccaaattctcaaagaaaaaccatacaatgcaattacttacaactcacgttctttatgatggtgtatgtatatatgtatacaagaaacatcaaagaacatcaatggtataagtgtatacaagaaatataattctttatgatggtgttatgtctggccatcaaatcgttcttaaatatttaaacttagtctgccagaatactcaagaaattcattttaggcctttttgggggggctcccagcccccaccatgtctcaagctgagcacacaactaggacccctatcagcaaggctcctggcctcatgaagacagcactttgctgcaaaaggagggacctaatggccatgctaaggagacagtaacacaaggtagtgtggtacagagggatgagagtcacctgagatcatcagaaaggctttcccaggaggcagcttttttttttttttttgagacagagtctccgtcacccaggctggagggcagtggtgcaatctcagctcactgcaacctccacctccctggctcaagcagttctcctgcctcagcctcccgggtagctgggactacaggtatgtgctaccacacccagctaatttttgtatttttgttttgttttgttttgttttgtttttgagatggagtctcactctgccacccaggctggagtgcagtggtgcgatctcggctcactgcaagctctgcctcccgggttcatgcgattctcctgcctctctcccgagtagctgggaccacaggtgcccgccaccacgcctggccaattttttttattttttattttttattttttatttttttgtagagacatggtttcaccatgttagccaggatggtctcgatctcctgaccttgtgatctgcctgcctcagcctcccaaagtgctgggattacaggcatgagccaccgcgcctgaccaatttaccaatttttgtatttttagtagagaaggtgtttcaccatgttggccaggctggtctcgaactcctgacctcaggtgatccacccgcctcagcctcccaaagtgctgggattacaggcattaaccaccgcaccccgcccaggaggcagcttttgaatggagacatgaaggactatgacacatccaacctgtgaaaatctctgtgtgcatggctggggttaaggggcagagacagctagtggcagaatgttgtgggcagaggaacaacaaggacaaatgcccaaggtggaacttgtgtgcaaaccttaaaggaacagaaagaaatccagtggtgctggaacagggcaacggggtgaacgagggggagatggagcagatgaggtcaaggagatgggcagggctggtggatgaaaggcgagaactcccttccaaaggacaaacatttatttaaagtgcaaagcaaatgttatagatggattttaagaaaagggaggtcgtaatctaatttacctttaaaaaaaaataaactagactttattttagagcagttttagttttgcagcaaaactgagcagaaggtacagagatttcccatgtgccccctgcatttgacatgcacagcctcctccattatcgacagcccccaccagttggtccttttgttacaactgatgaactgcactaacacatcaccatcacccagaatccatagtttacgtaagggttcgctcttggtgttgtgcattctacgagtttagatcaatgcataatggcatgtatccacctacaaagcagtgtatagaatcctacaaagcagtgtcactgccctgaaactcctctgtgctctgcctgtcatcccttcctcccctcaacccctgataaccactggtcttttcactgtctttacaattttgccttttccagaatgtcacacagttggaatgatacagtatgtaaagcatgtaaaacacaaaacaataaactccttgaagataacataggagaaaatctagatggcctaggatttggtgaggactttttagatccaacaccaaaggcacattccgtgaaagagagaaatgataagctggacttaattaaaattaaaaatttctcctctgtgaaagacactgccaagagaatgaaaagacaagccacagactgggaggaaatatttgcaaaggatattatctgaaaaaggcctgctatccaaagtgtacaagaacacttaaaactcaacaatcacagaataaacaatccagcttaaaaatgggccaaagaccttagcagacaccttaccaaagaagacagagatggcaaatacctatgtcatatgtcctatgtcctatgtcatatgtcattagggagatacaacttagagcaacactgagatgccaccacacatctattagcatggctgaaattgagatcactgacaacactaaatgctggcaaggatgtggagtaacaggaactttcattcattgttggtagaaatgcaaaatggaacagccactttggaagacaatttgggggtttcttataaaactaaatatactcttaccatgccatcctgcagtctcactcctagatatacccaagagaagagaaaacttatgtctacataaaaactcccacgtggatatgtgtaataggtttattaataattgccaaaactttgaagcaaccaagtcatccttcagtagttcaacggatgaataaactggttcatccagactatggaatattgttcagagctaaaaagaaatgagctatcagccataaaaaaggcctggagaaaacttaaatgtatgttactaattggggtgggggaagccagtgtaaaagggctacatgctgtatgattctaacttaaacctttaaatttgttataacattattttctaaagtgtcatggcccattgggaatttcactccccatggtctgaggtagtgggattgtaatccggcagcattgctaatttttctactaattttacaggctttgccacactgtgactgtcaggaggttcttacttgcagaaggagatgcttcaggtacatgtttgtaccagagcattagtaaggctgcatcacagagtgagatgtgcatatcttcaggctctaaagacttaagggaagttcttcgaagctgacagtgaggcctttatgctttcaccatacgtataaaatcagtgtttctggattggaccccaaaaattcattagttctctgctctcagacaagacacttctcccagtggagcttgtttttcactgcctatggagagacaggtgaacaaaatgattccgtgtcttgacctatgacctctgtatcagagaatgactcagtagctactgtgaataaataaacccctaaatccaaagggctcaacacagcagaagttcatttttcttatcaagtccaatcagtggtaatgatggcagtgagaagtttgcttcaagcaaacttgaagcaaacttgttcagtgacttggcttctctctctgttgtgattttaccctcttctagagcagttctggccagtagaatattctatggtgatggaaatgttctatatttccttgtccaatacaatagccactaaagatgtatggctatgaagcacttgaaatgtggcctgtgcaatggcagaactgaatttttaattttatttaattttttaaagaagaaaaacattgaagaacctttattatctcatttcaggacttactttatggtatttaaattagggaaagtaattaagacagttctattagcttatgaatcaatggaacaaacagaatagagtccagaagtgaatatatatgtgtatagatatatatatgtatatatataaaaaatatatatgtatattcaaaatgtatactgaatatatctggaatgtgtataagtatataattgaatatatatggaatttgattacattaaaatatatatattcaattgatctttggaaagatcaattgatcaattgattatttgatcaatttaatcaatagtcttcaactgatctcttggaaaaagatcaattaaagacgatttctcccactacccatttaccttgtcaaggccaaggtggatggatggtggagaaaatccttttcaacaaacagtggtagaacaactggatatctgtatgaaataaaaatggagagatagatttaagaggaactataactatgccacattggtgtatgttatttttgtcaaactgattactgaagtgagaagcatcggctgcaactttaagaggaaggaacaggggcctggaaacattaaataaaaacacaataatcacatagcaaggaaatgccaaaggcaagattgaaatccagttatctgtcatccaaaagttgccccatgatggtatgggagacttgcaggagaaaggtaaagagatgaataagtgaagggcgacaggttgtaagttagacagcaactgaggtctctcactgccccttgtctctctatatatgtattttgggtctcatctaacttcaatttcacattttatttttatttcattgggttggggaagggaagaaatcaagagtacttgggactgtgatagttctttgtctctcatttttatttcatttaaattaattcaaatttaaatagcaacatatgattagtggctattagtagctagagccttggcgccctttctattcagctggcaggtaaggaaggatgatcacagggtaggtttttaaagggccagtctgagaagtggtgcacttcacttccttttcctttcctctggctaacaccgagtcacatgaccacacctcactgcaaaggaggctgggaaatgtagtctagctgtgtgctcagaaagatgaaggaacagattttggtgagcacatagcaatatttatgactccaggattgaaatttcaatgaagactgaaatgtgcaccacttccttttgaagcagctacagaaagcaacaggcaaatccaccaaaagtagttacataagaacagcatagatgccaaactagttaaaatgcctaattacaaatgtttattatcaccagcagtaacaagactaagatcagagatgtgtatgctcaactatgtatattcacccaacatctgtcacatgcctacttggtatcagatactatgccagacacaggggatgccatgatggacaagatattatctgcaaaatataattttaatttaacatggcaggtgtagcattagaggtaagggtaaagtgcaatgaaaactcaagaaaaggatgctgaattcttttggtggtggatagaaagccaatttgggccagggtttccaatagatatgtgcatgtgtatgagtgcagtgatacacataccttgaaagacacttttttgagacacaggagtgtcaaggaataggtggtggggtgtcttcaaatcaaagtcaacagaaaacacatgtcataactccaacatggatgtgcagttctccttatgtcaaattggtggctgacctaaatccactcccggcctcagccatgtgcccgaggtcatcagatacactccacattccttccacagcatcaccacgatatcatctgaaggttagctgggcacattgaatagaaaccactgtctctcctccaacctcccttggagttccttcttcacctcccctctcctgtaatgctttctcttcttccatgtttggtggtaagttatttacatgtctactccctaacacaaaatggtggcctgtcgctgggcttcagtgtccatgagtttattatcttagcattaacacggtatctggcccactaaatatggtgcacttcctggtggcttggtgactcataatcccttcaccttactttcaataatagcatcctaatgtgcttctgaaaggtgaaaggtttacctcgccctctgtcttgggtcttgtaagactgcaagccaaggtgtcaagaatgggacctttgcaaccagcctctcttcagccccaggactttgaatctggagtacagtgacatgaggtcaggaagtggttggagctcatggtcccctgacagtgtacgtggttgagtttgcctggaccccagctataccttggttgcagtctattttaagccagggtctttacccttcccatccattctttgagcctcatagagatttcccatgaattttcttcatctatagctagactgtaagaattccaatttgtagaatgtacatctgtaagtgcatatggaacatgttactaatgaacgtcacagaagactaaatgtaaaatccctctttatgggctagtagaatctgttttacacagaagcaaaatgaaacacatccagtatatattggagtccacaatgggaatggggtcagtcaaacgcatgtgaccagatgttattttcaatatgcttgaagatattttcacttgactcttgagatgaaaagagacaagtaggactgagacttggtacacacttcacaaccttcctagacttggaaaaactttcaaaggctctagagtaaagtcaaggttcccatcttcctgttccccagtactaatcagaatggattcctccttccttcaggacctcctgtccctctccagctgccatgctctcaggaatatttcacccttaaatgtttctccctctggactggagcttcagcttcagtttcttttctgtatcttctacggggcttagcacagggacttccttcataggaggtactcggaaaatatttgctgaattgaatggagttaatttgaattattgaatccaggtaagtggccttggtaagtccattagctttgccctgggaatctcgtctcttgtccttctccatttctattttgccatataaacatgacagagagtgattcagtagtcttccctattcacttcagagggttagaaatgagatgtgaaaatgacagcaagaagacatgtcaataatacccatgtggggtcagcgagtctcccgctgcctgcccaacctttgcaagaagaaagccatcaaggccacttgagtggatctcacacaattcccttgactcaagatgaccatgaggctcaggaggttggcagctaggatttctgttgagagggcattagagattccatgtccctgtcacactgatggaagccctgtttctcttggacatctgagcctgtagatttttcctctgctcatctcatggagcagaatttgtttttggtgtacacttaaaatattagggtcagctaataaaataataagaatcaaaggtttaccaactcataaaatattaagtctttaaggcttatctgacactgtagagccctctgtatttgtggggcctcatgtgtataccttctcccaggtaggtctgtgaatgatggactctaattttagttcttataacgtgtgtgtgtgtgtgtgtgtgtgtgtgtgtgtgtgtgacagagagagggagaactaaatacattatgtacatctgaaaagtcaccaaagacaagaaaaaaaaagtaggtatatatttagctaagtgttctgtggattttttttccttttgaaaaactccagtacaagtgttcaagccaagtagaagcctttcactccagttatttatttattttgctctctcctttggaaagcgatgcacatgtattatgaaaagcaaatattatactctttattgtcaaacaaagtttataaggttcgtgtgtcaatgatggggccaaggacctcacacagaaagtttcctgtcctggaagaatttttcatggaagataaaatatggaaagtggggggaatgctgactgccagcaaatagaatcctcccactcctaatggcacccgtggggttggatgagctcaggccttgactgtcctagctggagcgggggtgggggtgatgggggttcttccctatagactagcatgggccactcagtgaggggaaggaccacagtggaagttgaagggtgtttactcagaggaggctacttgcgtccaactccttgcagctctaacatccagatgcactcggcaaccaggcctttggacacaggaagtagaagcaaggtgatgaaaaatgaaaggcattctttggccttggagcacacaggcatggaatccggtaggagtacagttactatttacaggaaactggcacggagatataacttttgctagacaggttggtgccattgtgttctggcaccatgaaaagcattaaataaggtttaccatttgtctaaaccatgctgtatgcactctactttctgatatgtattgctttctccaactgggagtttcactaaagtccctccctagggagtagagagcgggagttatagtcaaccatggttaatttgtgctttgtgctttgtttatccaaaccatatgtctagatggttgtaattctgtgtcattggctgtgtaatgctctctgtgctaagatatctgtaaatagcaacagctcaatgcataatcacgttggtattctgaagggggaaaaggaagtttcaagtgacgtttgctgtgaagacaaccactccaatgatgtctccatacatgtctcccaggacataatctcttaagtattaatcatgcagacctatgtggatggcacaggacctcacagaagccagacgtggtgggtcaatgctacctccaattctaatactctagccttagggcttgaggacactctagatattaaatcatatcattgctattcagcagccccagtaagtagtttgtgtaccaaagagaaatccttttatgttggtgctagaaaaaattaaaaacaataaaacaaggggaatccaccaaaattttcttttataatattttcatttaaaaactttatttgattcaccagctttctatcaagaaaagacattgtgctcaagagctggaggtgataaagtccaatgtgaatttcttaaatggcaaattaccagccaggatgaacacacaaaggcttcagcttttatgtacggcctagaagccccagggcccctgttccccctgagcacccaagagcagcttctgaacactgcaatgtgctggctggaggcctctggagaagaggaggccagacctgtgaattatggcaaattctactgcaccctgacttcagcaacctcctaaatcagaaaagggggcattaaaaatgtttttccttcatgcaaatgctgccattcatttagaagtgaggccatgttacttcaggtgcccatagagcatgatcatttgagcatcccgaatggcattataggaagcctggccccagagtcagcctcagacggtggagatgtgacaatctctttgaagtcccagggaatgaaaggagtggtctgcaaacaagcctagggggataagctgaatatatttcccccagccttggcagagacgctgcaatccatagctggctcacattgccacacacatctcagcctgtcacattgcccaacagtcttggtgcatttcgttcaccaacccttttaccacagcaacatgttcaacgcatcttatggcctcaaaccccaatcttggcatacagccttgtcctgcactttatggaaaaatgagaagccatcgtataggaacaggagcatctctttcttgcatgacagaatctatcggcccatctgcacctccccatcctcccccaccttccttcagttacaaaggtgaagttcgcccttctccttcctgaggggccttttccctcctgccttctgacagtttccatcaacagatatctattcctttgcttacagtttccactagtctcccagtcttaaaattcatttcctttgctctcactcattttcctcctgctgttgccttatctccttacccttcccaatctggcttaaaagcggtgtgtcagctgggcacggtggctcatgcccgtaaccccagcactttgggaagccaaggtaggtggattgcttgaggacaggggtttgagaccatcctggctaacatggtgaaaccctgcctttactaaaaatacaaaaatgagcagggtgtgttaatgggcacctgtaatcccagctacttgggaagctgaggcaggagaatcactggaatcgggagatggaggttgcagtgagccaacctcatgccactgcacttcaccctgggcaacagagcaagactccatcttaaaaaaaaaaaaaaagcaatgtgtccatatgatgctgtccccaattcctcacctcctttcaatcttcaacccactctttcgactccttcaattccacttcttcccataccatttgatatggtttctgtgtccccacccaaatctcatcttgaattgtagctcctataattcccacgtgttgtgggagggaaccagtaggagataactgaatcataagggtggtttcccccacactgttctcatggtagtgaacaagtctcacaagatctgattgtttcataaggggtttcctcttttgcttggttctcattttctctttgcctgccactatgtaaggtgtgccttttgccttttgccatgattgtgaggcctccccagccacatggaactgtgaatccattaaacaactttttgtttgtagattacccagtctcaggtatgtctttatcagcagcgtgaaaatggactaatacaccattccatcagaacttccctgctaaccgctctaaatcctatattccattcttgccttccatctgagcaccaaccacaagtcaacatctctacttgaacaccctgtgttcaagacataaggtgaccatatgtcttcatttgctctgggaagtctctatttacatgtggtgtcctggcataagtagtcacagcacccctttcagactcaaaaacatcttagacaataaattttaaggtcacatatattagcagatataggcatctgtgatttgtctgtccaatctgtttatttccttattttcattttttgcttttagagaactatcccttgcagatactttttcttttttctttttcttctctttctttctttctttctttttttttttttttttttgagatggaatttctctttgtcatccaggctggagtgcagtggtgccatctcggcttactgcaacctcagccttccaggttcaagcgattcttgtgcctcagcctctcaagtagctgggactacaggcctgtgccaccatgcctggataactttttgtatttttagtagatatggggtttcactatgttgcccaggctggtctcgaacccctgacctcaagccacccacccgtctcagcctcccagagtgctgggattacaggaatgagccaccacgcctagcccaaataccttttcaaaattgtctggtcatatgacagatctacccagaatcagattggtataaagagagttactgagtcaaaagtgggtcaagaccattcacacccaacaaattttgctgacacaatttgaggaggaaaaaaaccctattttctcactggaattgctatgctggtagaatagaatagaagcctgaagagactgggccaactctgccaccaaacttagggagagcctgctagaagagaaaggcagcacagtgaaagcacagcttacagcaacagaagggggaagaaagagaggatgggagggaagaagagagagatccctaatgccaatgttgaacaccaggggctgaaaatctgttccacctgtgggctttatattgcgtaccccaaaactcttctttttcactcagtaaagttggaggtaggtttctctcacttaatgacaagacatccaggatctacacaagcatgccttgaactcagctccaggcagtcctatccctgctgtccccaaatctattcctactccacctttcaaatctcagcaaccatccagtttcttctgccagaaaccttggaatcatcttggacatcttcccttctctagcgccatcatgaaatcttattggtttatttttatgaccaacatatgtgtaaactctggttccttccctccatccacacggacccccaacaagtccataaaaccatcatcttacctgggcaactcaacagcctcccagtgggtcttcccatggccattctcactcctaacattctccgtggaacatctagagtcatcttcttaaacttcaaatctgcttatggtgcacaaggccatgcttcactggggagctgcaaggagagtagagggagcattgccaagttaagttaagagcttcaagacattattgaagctcttgtaattcctgaattcaccaatacaaattctatttcaggctgggtgtggtggctcacacctgtaatcccagcacttctggaggtcaaggtgggcagattgcttgagcccaggagttcaagaccagcttgggcaacatagtgaaaccctatgtctacaaaaattacaaaatttagctaggcatggtggtgtgtgcctgcagtcccagctactccagaggctgaggggggaggatcacatgagccccggaggcagaggttatggtgagttgagatcacaccactgtactccagcctgagtgacagagtgaaaccctgtctaaaaaaaaaaaaaaaaaaattattagagacaatattagcatggttcccaagaatatgtgtcttatttttcaatcattatttgctttattgtgtttcaatcagaagcttagggtcaaactttcttccttgagctgggatatttgaacactgaaggttactagcaccttcccatggacagattgcagagagtggtgttcagattttaaataaaaatctctaccaatgctgccaggatgttaagcagagcctgcacagaaggattgtacatgggtcagtgactgcagggtcatttgtagaccctggtatttgaagtttcctacagaaccttcctggaagtgagtgttctcaaaggaggggcatgcactacctcgccactctaatcttagatcctaacctctctccatctcctccttcctcaaaacagacctgtgggttccaaatttgattgaaactgagtccagtaatattagtcctacctgactgggatgctgtcctgacccagtggttttagaagggagttttatagaagaagatatgagaagggtaaaattagaggggtgcatgcatgttcctgaaagagaagactaaacattgtaagggggccattgcctcaatttgtgtataagtctattataattccaatccaaattttaataaagttttctttgaaacctgacaaaatgattctaaatgttgtctggaagaataaatgaataaaataatcaagtaaagtttgaccaaacagaaagattagaaacatttgcaaggacattaagatagattctaaaactacgacaattaaaatagaatgttattggaccaaggatgggcaggtagaaagaacattaagaatctattccataataggagagctttttcaagtctctgggggaaatgatgcggggacaactgcgaaacactaaagataaattgattcatcactgcttcacaccacatcctaaaataaatgtcaagcggattataaatttaaaaatacatatacaaatgaactagaaggaaatataggtgcatgtttatctgatcttgtaatgggaaaatcttttaggtagtgtattaccataaagtagaatcttgatgaaattgatcacatgtaaattcaaatattctgccataactatatctaagagcaaataggaaactggaaaaagaaacttgcaatgtatgtaacaaagggtttacattcttaagtctctgaaatgtcaatgtggacaaaagacatgattagaaaattcacaaaggaagtactaacagcaaaaatatgaaaaatgtttaactttgcaagctgtcaaagatgtgcaaactgaaacaatagtgaaacacgatttttcagctattacactgacattttctaaaaaagaaaagattatgtagagcctgggaaaatgggcacccacagattgctaggatgatcctaaagtgatacaattgttctagagggtaacttggcaaaattctttaaaatatgtgtagttcatttacccagcaattcctcttctaggaatttatcctcagaaaataatcataaataactgcagaaatttatttaaaaatgttccctggaaggttgtttataaaagcaaaaaattaaaaacaaaataaacgtctgaaaatatgcagctgcttaaataaagtatggtgcattataatccaaggtcataaaaaaatcatactgagaattatgtagtgacttcagaaaaggttcacaatatatagttaaatggggaaaaaagttgcaaacccatctgtacatttcatttttttgtttttaaaaaatgtatgtatgtaaatatatgcatagaaaaagactttaagaggataaccaaaaagttatcagtgattatctctgggcggcaaaagtgttggtgattttcattattcctcaaatattctgcaataaaaatgtattactttttgtaacaagattcttaaaaacattaacttttatttaaatcctgcagagaagtcaggtatcaaaaaatggtcttcaggaagctttttcggggaaattcttacagccaaaaactggggaattgctggggaaagtggtcagacctaaatgcagctgagctaggagaagacaacccacctctcagggccacggtcctggagtcagcagccccatcactacccctgcttcccatcactgctttttttttttttttttttttttttgagacggagtcttgctctgttgcccaggctggagtgcagtggcccaatctcggctcactgcaagctccgcctcccgggttcatgccattctcctgcctcagcctcccaagtagctgggtctacaggctcctgccaccacgcgcggctaatttttttttgtatttttagtagagacggggtttcaccttgttagccaggatggtctccatctcctgacctcgtgatcctccagcctcggcctcccaaagtgctgggattacaggcatgagccaccgccgctggcccccatcactgcttgttttatgagtcatgggatggaaaagtgatatggactaaaaataataataatgaggatgatcacaataataatgcagatgataatatattaatagaaaactgacatttattaagcacttggtattttccagaccccaagctaagtgctatacagatagcatctcatttaaagctcacaacaatccattggcaaaaggattattgcctgggattcatagagaaagaaaactgagaccaggatggtggcacgatgatgtgattctcccacactttcagctctcaggaggccgagcggaattacaaacatacctgagtctgatgccaaagcccctggctgatctacattgattaggtgcttacaggagcatttttccaaacccacatgccccgatcccgacttcaccacccaggcctcaatttcctttgtgattcagcctcgtattatgtagcctgactccactgtgaaagatttgtggcagttgcatgatgtatgaggtgccatttgtaaaaatattatttagtgtaaaacatgatgttttttctcctgatttacaagttggatttataaatctgcacttctcactatctgagttatatatcttgcctctgatttataaaacttgcctgtaaatcttcccagcaaagttttgattcagaaatcattattttaagaattagatttagttaaaacattcagctgctttataggggaggaaatggatttacataactccaaccggagcttacggatcctatagcagcttcacaagtcgtgcctaggaattcctaaggaaaatgttttgatttaagggcattcacttcacactttagctacacctgactgatttatatcaccaaagccatacaatgatgatccattttataaaaatcccacttttctttaattccagaccctgatttatatgccctgattgggtatctgtaatgctctcagtcacaggctcctctgccctagagctggtcttggggaaaaggcctaagaatcagggatggtcagaataaagggaaatttcacctccttcttggtttatctcccttattccaagggagccaaagcaggttgcctcctgcccctgagctagagccagctaaccctgggggagcgtctgtaagatgccacagccttctccaagaatgtggtgggttctctccatccctgctgctcaaatgaagagcggattgctcccaagtagaagaaatcgccagtccagagaatcgaggacatgtttgatgagtaattgctggctgaaaaaaaagtcaatgaataaatgaacgctttttaaagagcagaggccaacaagcagtgatctgacaaatagtataaatgaacgaaaagggagggtgtgtgagagccttgtgagaggctgctccaatctgaacagggtggctgtagctcagctccacctggctgtggttaagtaggattacttgcccagtattcccacatgtggctttccaaggcaatcctgaaattcaaatgtttattttaaatgacttattttaaaaatcaacattgtgcaggtttagtttaaaatagcaaaatacacacattttaaatgtacaggtcaatggcatttgaacaaagtacacactcatgcaaccaccaccctgagcaagacatagaatgtttccatctttccagaaatcatcctcttgcctcttaaagtcagtgacctccatcctaccccctgctccagttaaccgctggcctcatttctatctctacagatatgtatttttttctgttttaatataattggaacttaatataaattgaatcatacagaatgcatttgtttcctgtcctgtttctttcacttagcacgcctgtgagtgagattcatccatgcacgtatccagcatttgttcctttttatggctgagtagtattccgtggtctaaatgtattatagttgttgattcatttccagttggtggacatttgagttctttccagacttaaaactattatgaataaagctgctaggaacattcctggaccagtctctttatggacatatgttttcatttctcttgggtaaaaacagaggaatggagttgctgagtcatttggtgagtgtatgcttaactttccataaagccgccagacagttttcaaaagtgattttgccattttacactccctcccctccccagtaatatatgaaagttccagttgctcaacatccttaacaatgcttggtcttgtcagtctgtttaattttagtcttttagtcagtttagtcataatttaagtcatttagatataaagtggtattccattttaatctgcattttcccaataactaatggcactgagcatcatttcattcactcattggccaattgtgtatcttcttttgtgaaatgcctattcagaacttctcttatttattagttgtttgccttctattattcagttgtaagagaactttgtagactctggatactagtctttgccagatatgtgcattgcaaatactgtctcccagtctgtggtttgttatgtctttttcttgtcaatgtcttcggcagggcaagcaattttaatttgatgatgtacaactggtcatttttcttctttagttagtgctttttgtgttcctagaaatatttgtctacccctaaattgcagtttttctgctatgctacctcctagaagttctacagttgaaggcattatgctccgaacctacgactcatttcaaattaattcttcaaaacaacgtgagcaaaggattgaggttcattttttttctacacagacacctagttcttgtagcaccatagaaatcaggaagtgtgagtcctccaatttcgttctttttaaagattgtttcagctatgttaggtctcttgcattttcagatcagtttagggtaactttgttaattcctaccaaaaaaaaaaaaaaaagcctgctgagattttgtttggaattttgttgaatctataagtcagtttgggtacaaagaacatcttaacactatctagtcttcccatccactaacaggacatgtctttcagttaatttagctcttccttaatttctttcaaaaatgttttatagctttccatgtagaaatcttgcacagctttcatcaaattaactcccttctcattttgaaattttattttctaaatacttgttgttcataataattaacttcatatattcatcttgtattctgtgacgttgctaaattcatttttagctctagtagtttttttcataaaatccttaggattttctatacggataatgataacatttgttaatacatttttatttcttcttttttaaatatttctctcctttttaaattcgtttgtttatttattttgccttatggcattggctaggacatccagtacagtatttatgggaagtaaggagactgaacatctttgtcttattcccagtcttagggggaaagcattctggctttaaccattaacaatgatggttgctgtatgattttcatagatgcccacgatcaggttgagaaggtttccttctatttgcaatttgctgcgtgtttttcatcatgaacaagttttggatttcatcaaactcttttgctgcatctatctactgggattattatatgatttttctactttattctataatatgtgaaattgctttgatttaatttttccatgttggaacatctttgcaatactgagatgcagtcttcatatagtgctgaattcagtttgctaatattttgttgaggattttgctttgtgtgttcataagagatattgacctgtaatttcctttccttccaactgcattgtcggcttttgatatcaggattgtgctagcctaataacatatgttaggaagcagtcacgcctatatttttggaaaaagtctgtgtaatattgatgttatttcttttgtaaatctgtgatagcattcattggtgaactcatcacaacaccgaatttcttgtatgggaagtttttttatgataaattcaattattttatgtttttccagctttactgtggtatacgttacaaataaaaattacatatatttaaagtatacaatgtgatgttttgagctatgtatatatcatgaaatgatccccacaaccaaactaattaacatacccttcacctcgcacaataaaatatttttcatgtgtggtgaaaacacctaagattaattctcttagcaaatttcaagtgtatgatacagattaatctactattgtcaccatgctgtacattagctctccaggacttatgtatcccaaataactgagcctttgtgggctgtgaccaacatttccccatttccccccaaccccaacccctgataggcaccattctactctctgttcctacgagttcaactgttttaggttccacatataagtgagatcatgcagtatctgcctgtctgtctctacctgacttatatcacttaacataatgtgctccaggttcatccatgttgtcacaaatgatagaacttcctccaatgtgtgtatgtgtgtgtgtgtgtgtgtatcacattttctttccttctcttttttctttcttttttctttctttctttctttcctctttctttctttcctctttctttctttctttctatttctttctatttctttcttctttctttctttcttctcctcttcttcttttttttttttttttttttttttaatttgagacagaatctcactctgtcgcccaggctggagtgcagtggcacgatctctactcactgcaaccacggcctcctgggtttgaacaattctcatgcatgcctcagcctccaaagtatctgggattacaggaatgcaccaacacacctggctaattttttgtatatttagttgcaaaggggtttcaccatgttggccaggctggtctccagtgatccacccacctcagcttcccaaagggctggaattacaggtgagagctaccgtgcccagccacgtatttgttattcattcatgtgtcaacgtatgtatgcttaggatgatttcatatcttggctattgtgaataatgctacatgggggtgcagatatctcttcaagatactgatttcatttcctttggatctatatccagaagtgagacagctaggtcatgcgacaggtctattttagtttctagttatttttagttttttgaggaaactctgcactgttttccacaatggctgtaccatttacattcacaccaacggtgtacaaaagttactttttctccatatcctcatcaacatttgtcatcttttgtctttttgacaacagccattgtaacaaagtgtcaggtgatatctcattgtggttttagtttgcatttccctgatgattagagacactgagcaccttttcatacacctgttggccctttgtatgtcttctttggagacatgtccatttaggtccttagttcatttttaatcaggtatttggtctttattgttaaattgttcgagttcttttaaaattttggatattaatcttttatcagatatacagtttgcaaatattttcttccattcccttaggagtgtcctttcactctgtttatttttttcctttgctgtaatgaaatcggacccttatctcacaccatacacaaaaataaactaaaaatgaattaaagactcaactgtaagacctgaaactatgaaactcctggaagaaaacatagggaaaaaccttcttgtcattgatctgggcaataagttcttggctatgacaccaaaagcacagggaatgaagggcaagtaataggtagaattgagtcaagcaaaaagcttttgtacagcaaaagaaacaatcaacaggctgggcgtggtggctcaggcctgtaatcccagcactttgggaggccaaggtgggaggatcacctgagctcaggagtttgagaccagcctggccaacacggtgaaaccccgtctctactaaaaatacaaatattagccgggcgaggtggcacatgcctctaatcccagctacttgggaggctgaggcaggagaatcgcttgaacccgggagcagaggctgcagtgcacagagatcatgccactgcactccagactgggagacagagcgaaactccgtctaagaaaaaacaaacaaacaaaaaacaatcaacagagtgaaaaggcaattctttcaatacattggagactgttcaattttttattgccccttgattcagttttggaatacactagttttaaagtaatttgtctctttcacctaaactgttaaacttatcaggctgaagttgattgcaatatgtccttatgataatattcctcattatttcttactattattattgcttcttattattctttaaaatatgcatatattttaaattcttctaaatatgtattaacattctacaggatatgtattaatatccccacttgcacctctaatactgtttatttgttttctttattttttcattaatttgtcttcctagagatttactaattttattaagtttgttttcaaagaaccaacttacggctttgttaattttccccatgtgaatgtttaccattcattgatgtttgttcttatttatattaattctgtcctctctttgctttgagcttattttctttttctgtctataaaatagaaacatcaataattggtattaaacctttttcttttctaaaatagatattgcaagctatacattcttttcgaagtattgctttagctgtacactgcacccaacaaagtttgaaatgttaaattttcatcttcatttgcttcaaatattttaaatttatcttgtaattttcactggcttctgagttattgaaaaagcttgttttattccaaaatgtttagagattttctagatatgtcatttatattgatttctaatttaacgccatgtggtcagaaaacaactctatctgactgcaatgttattaattttgctgatatttattttatgactagaatattagctattttggtgaccattccatgtgcatttgaaaataatacatattctgcaggtgtttgtggtagttctataatgtcaattatataaaaattgtggatattgttatattaatctttgacatcttcatctatggtttgtatatttttattaattaccaaaagagaaatgttaaaatttttctatcattgtggctttgtccatttttccctttatttctgttaatgtttccttcgtgaattttttttttttttttttgagacagactcttgctctgtcacccggactgcagagcaatggcacaatcttggttcactgcaacctccacctcccaggttcaagcgattctcttgcctctgcctcctgagtagctgggattacaggcactcaccactacacctggctaatttttgcatttttagtagacatggggtttcaccatgttggccaggctggtcttgaactcctgacctcgagtgatctgcctaccttggcctcccaaattgctgggattacaggcgtgagccattgtgcccggctatgaattttgatgccctatgataaacggtatacatatttaaaattgttctaccttgctagtgaattgttcctttaatcattgtctaatgcccgtatttatctcttactctttgtcttgaaatccaccttctctaatacccatatagccacgccagctttcttactcttattgtttgcattgcatgttttatccatcttttacagtcaatgtcttgttatttatttttaaaatgtgtctcctacagatagcatcgagttggatctcactttttttcctagtcaaaaatctctattttcattgggatgcttagtatatctgcattttattatttgatgagttgaggtttaagttcatcttataatttgatttccacttccctagcatgttttataaaattatttctattgcttatttcctgtattctttgataaatattttagatatctaatacatcttctcttttttgtacttaatttttgtgtgcttgatgtagggctactaaaatgtgttttttaaattatcagtctatttatagtcaatattatacctcttcacatttcacacttcccttctgatactttatacttcctgttttacaataaatatttttcccaggatatgatttttttacctccttatatccttcctacaattgctatcctattttttacttatctatatatgttaaaggtcactctacagtgttattatttatgtgataagtaattagttttattatgagtaatttaaataaattatgagaataaaagggaggcttttatatttacagactcatttccaatttctgatgccctttattttttacacagattctaaattttcatttgctgttatttctttcagcctgaatgatactattcactatttcttttttgcaagaatcctagtaataaacttcctaactttctttgtctgaaattatcttgatttcattctcactttcagaagctatttttgctggatatagaaatctaaattgacaggatttttttttcatttacactttatttttattcttattttttggagacagagtactgttctgtcagactaaagtgcagtggtgcaatcatagctcactacagcctcgacattctgggctcaagtggtcctgcctcaacctctcaagtagctggagactacaggcatgtgacaacatgcccagctaattaaaaaaaaacaaattgtggagatgggatctcactatgttgtctaggtttgtcttggactcctgagttcaagtgattctcctaccatggcctcccaaacacttgcacttttaaaatgtaattaaattgacttttaatagccttcattgtttgatatgaaaagtcaacagtaagttatttttatccttttgtttcatgtctgtaatgcgtgtttccagtatggcgctttcagtattttctttgcaatttgactctgattatttattttacatttatcttgcttggaattgacttagatttttggttttgtttttaatctgaaaatttttttcttgtttttcattcaatttgttaagtttttagtcattgtttttctaaatgctggtgtgctccttacaattgttttctgagactcaaatttcaggtatgtaaaagcagtagttctcatattttttggtcccaatacttctttacattatgtaaaattttcaagcaccacgaaagcatttgtttatgtagttatatctatcaatatttatattagaaagtaaagcagacaaattgttaaaaatatgtattttgacacacataaaaacaaaaataccataacacattaaaataaaaaagatagacttattgaaaaaaatcaaaaattcttcgtgagaagaatgacactttcacagagtgctttttatggcttaatagaagacagctacagtctcatatttgtttccgcatttaatctgttgttatatcattcatcttgcagtctatggaaaactccactttacacctatgaaaagatggacgtgagaaaggcaaataatatcttagttatcataaatatagctttagtagtacagattttatgaaataatcttggggacactcacactttgaaaactgttattaagcaattaaatattttcacacaggtccataaggttctgtttattttttttaattctttttttccgtatatgttattgaaaaatgctattgatttataaacaagatccttctttctctgcccagttataatcttctgttaggttcatctggtaatttttttaaagtttcagttattataattttctgttactgaatttccattcggttgattttttgtatagtttacatttttctgctcagattctttttctattcaatcattaggaccatatttttctttaattctttgaaaatattatacttgttttaaagtctttgctagctccatcataggagtcatcttacatttagtttcttgattatattttctttatccctgaatcacattttcatgtttttatttttgtatgcctaagtgatatttgattgaacactgcacaccacagattatatgtggtagagaatgtggattctgttatcttttcataggaatgtgtgcacatgtttattaggcagttcagttgcttgcacatcgtctagtaggcttggttttatgttttttaaataataaatggaaagtccaaggtatttcccaagcccctctaatttgacaggactcaaactgcaaactcttgttggggcttcaatttggactctgttgggacaaattaagaatagttcttataccttagacacaattttctgttgtcttgaaagatgctgagatgttaaccatatgctcaagagatctcttcactctaataaggttgagaatcaagcatccagccccaccacactgcctgtcctccgtcactgtcaaagctttagtctctctgctctactttcaatctcccaacagcttaactctggtaagcactaggtaatctccatgcacgtgcagtctggttctcagccatggacttgcagggaaccacctacacacctccctttctctgatgcgccattgtgcagactgcagccatttgaagtgactcaaactctgacctcattctcctcagctcagcatgcccaccatcctctgcccagatatcagcttgctctgctgtgattgtgctactattacaaccccggcaggggactgaatgaccagaaatctcctcacatgagcttcccttctctctgaaatcactgctttgtgttatctaattgttattgccccaaatcagttgtcatacgttgtgtctagttttatagttctttatgacaagagaaccaactgagctattccgtaaacctgtgaggttcactgggcccacatacctcactctgatcaggcaatctgccctgtcataccatcttcacttgatgcctagtagacaattattcaagggatgtaaactatatagataattaagtgggtaatttcatttcctcagtggatttttaggcatatttttgaaatgcatacttctctacttagccagtgactttcctctcacatatggcagccctggtctttgaatcttcacttaaaatttgtcccttccagaagacagctttagtattagtcagggttcttcagagggacagaaccaataggatgcatagatagataagtgagaggctatttattaagggaattggctcacatgattatggaggctgagaagtcctacaacaggccatatgcaagctggagacccagggatgcctgcagcatggctcagtccaagtccaaaagcctcagaaccagagaagccagaggtgtagcttgaagtctgaggccaaaggcctgaaaacctggggcaggggttgctgctacacatcctagagtacaaaggcctgagaatctggagttctgatgtccaaaggcagcagaagatgggtgcctcggttctacgtgagagaacctggagttctgatgtccaaaggcagcagcagatgggtgtctcaggtctagaaaacagaatctggagttctgatgtccaaaggcatcagaagatgggtgtctcagttctacgagagagaacctggagttctgatgtccaaaggcagcagcagatgtatgtctgaggtctaggagagataatctggaactctgatgtccaaaagcatcagaagatgggcgtctcagttctaacagagagaacctggagttctgatgtccacaggcagcagcagatgggtgtctcagttctaggagagagaacctggagctctgatgtccaaagtcagcggaagatgggtgccttagttctaggggagagaaagcacaaactcaactttcctctgcctttttgttctatttgggaccccagcagattggatggtgcctgcttacattgagggtagatcttcccatctcagtccaccaattcaccctccaatctcctccagaaatacactcacagatgcacccagaaataatgctctatcagctatctagatatcctttaatccagtcaagttgatgcctaaaattaaccatcacaccctcctaaaccaacctgtctgaagccttcaatgaaaggaaagatgcacatatatctgtagctataactactgactgtttatatggattaagagaagtatagtacttcatacctgtcattgatggattttttttctccactgcacttagaagaactacaaccccaaattccttagtctgaccttggcacaattccatgcttggtccctagtcatttctaatccatgttggtaactcaacctacaattatactgttacacacttacagacttcacttaaaacaagtctgtgggatttttgccatagtcactcctaactatcatccatccactcacccctgtgtagtcagggtcccactgtatcacaccaacccatgcatggtatcctatatcatataatgccctgaactttcccgtgtcagagggaggtgagcccggcaggctggtattatagtggtgaccgccctgccgcctgcatatgggatgagtcctctcaaatagcagaagcagagggggtgggggcagatgcatgtcccaccgacacaggataccatcctcgggggctccgtgcctcccctgccaaggtcagggttgttcagatgatatgggggagcagcggagtggtgttcatcgagctctgggaatgggagctgggtcccctctctgtgaccttaggaagcttatttaacctcactgactctgttttcctcatctgcatttggaaacttgatgtaacaatatcaaatcatgatttctcatgtggaatacacttggaggagggcggtttgcactgtggttgctctaccctgagggtggttatcagcaaggcctttttaaagtagacttgagctttaggtattaagaacctaaaacatgtgcataacttttggcctgggatttctctccatttttaggtctgtgttccaaggaaatgatcagtgatatagttaaatatttgcattcagggatgttatttgaaactttatatataacaatgacagtgtatgatataatttgcatctgtgtctgcacccagatctcatgtcaaattgtaatgcccagtgttggaggtggggcctggtgggaggtgattggatcttgggggcggatttcctccccatgctgctctcttgatagtgagtgagtgagtgctcattagatccggttgtttaaaagtgtgtgcacctccccactctctctcttcctcctgctctggccatgtaagacatgctggcttcccctttgccttccaccatgactgaaagtttcctgaggcctactcagccatgcttcctgtacagcctgaggaactgtgaccaattaaacctctgtcattaaacaagaagctacttttataagaaattttataagaaattctcataaattgcccactctcaggtatttctttacagctgtgagggaacggactactataaagtatatcagtataaaattagcctacatccaaatatggaagattgcccaaattgtgatttatccacataatgggatatgtatacggtcattcaaaatcatttctttttttttaattgagatatggcctggctctgtcccccaggctggagtgcagaggcatgatctcagctcattgctgcctcgacatcccgggttcaagtgatgctcccacttcagcctcccaagtagctgggactacaggcacatgccaccacacttggctaatttttgaaatttttgtagagacaggttttcaccattttgcccaggctggtcttgaactcttgggctcaagacatctgcccacctcagcctcccaaagtgttaggattataggcatgagccactgctccttgcctaaaatcttataaagaaaatttaatatcattggaaaatgcttacaatataaagcagtcaaataaatactctatgtaatttgttatgtatgtataaagtatataggaaaatattcacagtgttattatctctggatgatagtgttgattgttggtgatttattatttttttctttattataatattctatatttttcaattgttgcaagtcagtatacaataaacaaaaatcttacttacgaaaaaatgttggagttaaagtctggggtctggatttgagtccaggccccaacatttgctgtgcaaccttaagtaggagaaagctgaaaaatgggaaaaacttgtctcacccttctcattggataggcaaggaactaaaataagataatgtgcacaggactcatgtggaaggaaaatggcaaaaaagataggggggctattgctcatatgaatctgactaggaaacaagaagctgctcttaaaagaaatattgatgcttacaaggtttcaggtcacccctatctcctccagcctatctttaaaatagacaaaattcaaaacaaaacaacacaaaatctcacgcagaaggttcttctgcctggtaacagaatgcttctgtgtagttaaaacacaagctacatctgacaactgcactatcagatgggagctctggacatgtgaaaatcattgctcctgtactgtaagacctgatagagccctggtcagccaccagccttgcagaggattacatggggtctccatacaaagctggatgcttcaagatagttgcagtctcaagagtgcattccctgcctctgacggagtggtaggggctgttacaacccatcctgtggtgcccaagaagacactcagcattcattgcaggtagtgtggcccccagtgcagccacattggaatccatttgtaatatttatttaactagaaaatataaacgtcctaagtcccaacaatcctacttctctgcagcaactctagggatgtatttgctgatgtgcatgaaatggctgggcattccttttaagtactacatgatattccatagatgaggcatgctaaaatagtattcagacctcagagacttctcttattgttcagcatctcgagttaagctgcaatgaagtgaatcgacatgtcacaacatcaaaagtctccaagagtttgttttttttaaatttaaaaaagtatgttgctaatcagaatatacactatcaaatcatttatataaaaataagtcaaaacactacaattctaatttctgtgggtgtataaggctcagaaaaatgtctggaaagattcataccaaattgatcatattgattagacctgaaggtatgggtgaatgtggaggatacaatctttcttacctgtatttaaaatcatttttaaaaagaatgtgttcatgtattacttgtgcaattcacataaatttgacagtaaaaattaaaatagctgacataaaataattatgaatagtcaacaactgaacaaacaaataaatatactatagtcattcaaagccaggtttctcattgttggagaaaggagtataaaattggaaaggggaggaggagacagaataagccctaaggtgctggattgaaattgaagttataagtaaaaactcatggtttaaaaagggacagaggaagggaggaagggagagagagtgagggaggtcaggggagagaaggagagagataaagaaattgttcatatgcatacgcacagaggacctggaagcaatggaactccaatagcaacgagcatacttagcatggaggcgtttctttctatgtcattctcctctaagagaagacagggccacttacaaaatggtcattgcaggcctgcaaccgagaaagcacaagatgagcctgaaacttctggtcccaaaaagtaaggaaatgctcaaagaataacagggacatatcaaaaggacaaagaagccaatttgcagagactcccactggccaaatatgaggcaaatttagcacaaaaataaataatgattgaaaatcatgatttattgaatgaaataagcattcaccagttacatggatataaataaataaatgaaaaagaaggaaaagctcttccttgcagtagaaagacaattagtaaatgtagaaggaatactataattagaaaaatttcctcttggcaactatcatcatcatccttgaatcaaacaagaatcgtcaacggatattaaaactactgaagggatgtttgaggaataacaggggatatttacatagtcttgaaatatctcccataagacgcttacttatttcaaaggaaaaggacattttcctaagaatggagaaagctggcaacaccactgtcaccaagacatccagattagcaactctaatcatgggacaaagctacatcttgtgccccctgacaggaagaaccaaggagaccaaggcaccattttggtggtatttctgccagaaatgagtaatgcaaacctaatcctcataaaatatcaggatttaaaaaacccaaattgaggacgatccacacagtagccagactccagccctcaaaaacgtcagtgtcatggaacacaaaggaagataaaggcataaaaggaggccaaggagagatgagcaccgaaggcaactcacgatctgtgatttccttccaccactaaggagagtgttaggataatcagccccatcagaacaaaatctgtagatgacgggttatcctatcaatattaacttcctgatttttgtgtattttctaattcctgtgtttatggaagtgcacatcttgtttatgggaaatgcacgctgaagtattcatgggtgaaagagcatcaggtctgcagttaattctccaatggttcagaaaaattaaagtgcgtgtatacacacaattacagtgtgtgtgtgtgtgtgtatgtatgtatgtattagtctgttttcacgctgctgataaagacacatctgagattgggtaatttataaaggaaaagttgtttaatgaactcacagttccacatggctggggaggcctcacaatcatggtggaaggtgaaagctacgtctaacaaggcagcaggtaagagaaaatgagagccaagtgcaagcagaaaccccttataaaaccatcagatctcgtgagacttactcactaccacgagaacagtatgggggaaacctcctgcacgattcacttatctcccactgggtcctgcctgcaacacatgggaattatgggagctacaattcatatgagattgggtggggacacagccaagtcatatcagtgtgatacataaaaagagagaggaagagagaaaagaataaaagctggtaaaatgctaacaattagggaatctgatgaagagaatatgagaattctcgcaacttttctgtaagcctgaaattacaaacttaaaaagaaatggcaagtttaaaggcaaaataaaggggtagacaaaacaacttgcagcaagcaaccagggtctccagccaagatgtcagagtcaacaacctggccaatactgcggagaagctgtgtatacagaatactcaaaactctgggtccaaggccgggagcagtggtccctgcctgtcatcccagcacttgggcccaggagttccagaccagcccaggcaacacagcaagaccttatttctaccaaaaaaaaaaaagtttaaaagactagcaaggcatagtggcttgtgcctgtggtcccagctacttgggaggctgaggagggaggatctcttgagcctgaatggtcgaggctgcagtagccatgatcgcaccactgcactccagcctggagagacagccagaccctgtttgaaaaaaaaaaaaaaagaagaagaaggaaaaagaaaaagaaaaagaaaaatatctggattcaggttcaaatgtcggccaagagaaaggaggacagtaagacctttcaaaaccttcatttctaaaacaggactattaatcctaaatcaaaggatgctggggtgatggagcaggttttgagtagttttgagtggagagcagctagcattgagccaagcccctagaacctgctcaagagatgagagtgtggctagtccctccctgctcgcttgcgacccccaagaccatcactgaaatacacagggaggtgagggcctcaagtacctgagacgctaagagtaagcacagagtgggtgaggagcctctgcctaggggtcaagtcagtgtcccgttgggttgcagaagctttttattgaataaagttccagggctccagtgatctgtcaatgctgcacctgcagcctgaggaagtaggaaaagctaggtgtccgcttattcagaggggcaggatagcccacccaacgcttgaaacgcatgtgcctttccagcgcagttggatctagctttggaaacttggaagactgatatgaagatggtcccaggctgctgcagtccttggcactagagggcaggccagcaggttccctgtctgcccgggtcaactgaacagggaccttggcaccgactgcagagtggctgctgtctacttaaacacacacacacatgcgcgcccgcacacacacacactctccaaagggaagcttaatatataaaaaatatagaattcatagaatcaaagtaaaattgaattcctcaggcagtttaactctttccccttgggcaggaaaaggttcagttttgacaaaacctcgaatacgcctccgctgagacctgctgtcacagctctgggtttgagcatccacagttcaggatggagggagaccccagagatagggccagacaggcctccgcccctccctctggcaggtccttcatctccccaaccccagcttcctccaaggtgacatgtaaagacagcactgtccagttcctcctgtcatcatggagataacagataacatgcagcgtcctggaagacactccgtggtcaataactagcagcaatgactctgattatcatccacatttgcttcctggggatacagaaatatatcctccctggagcctcggttctcctggactcagagagggacatgagctgctgctctgagctgttcctggtgcaagagctcccaggctgcacgcgccaggcacacagcacatgcccgggacacacctgtcgagtgaacacatggacaggcacagccaaatctttctgacatcttaaaagcactgaaggaaattctaagtcctcttaaaaatatatctttaagcacatctatgagcatgactttcctcacccctatacctgcaagcagacattgttacccttgagtctaaatcatcttttcccttttgcgttgcaaaaattttccctgacagccaacagaacatattcttcttctaattgttggtttacctctcacaaacgctggtggatctccccatctctaatcctcacccgctcattcattaactatcaagtgtggctttttggaacaattatattctgtcctgctgtcagctctatccacacaggtagagaatacatcccaactccttacatgggatgtaaattattgctggcataccagtacctgaagaatgattacacccagtgcacagttaaataatggatgcttagcacagtgcattgtaataagcaaaagatatgaaatatctacaattctaagtggaatacgctaagtattttttttataataaaaccgttttgggggaagacaggctattgaatcatggtctccagaaaagacacccatgtgtcagttcatttgcagaagccggctggcgctgtcatctcatctgtgaagtggggacaagaatcatatttttcatcaagtagaggtactgcttagcactgagcctgacacacagtaggtgctcagtaaatggcagtagctgctgtcatctgaggaatggctgccctggctaggctagcagtaggctggggcagtatctcctcgtgggaagagcagctggagtgctcaccacctagatgtacctgtggtcaggtttggtgtctgaccacagggaggggcaggcacaccaccctgccccaccccacccacctttccactgggaagctgagggtagagcctgctttgccaccaaacacagtagaaggttctggagggctgggaggaaatggagttagggtggctcttgaagacttctctctgccttggaagccttccagaaatagaaccctggaactcagtgcagtgctcaggcctgagcagtaggggcctcttcctgagccccatgctctgcagggcccttctgtgatccttgtcccagggcaaggagtatgcagatacaggggacatgtctgcctgggacctgcatccttcccatttcagagcatgctttagcccccttaggaagtccatttcacagcaaaggaagctgaaacccagaggatactggtttccctgcaaagcagaagaggtggtcttactaattccaaaccagttgttccttattccaaagctgttctggcctcaccctgcctcctgctccctagtgacatgggtgcctgggatattttgcacctgtgcaacaggcacctctttgacctccttcacagcaaatgaagctgagacccagaagataaaggattccctgggaagcagaagaggtggtctttctaattctgaaggtgttctagccccaccctctccccacgcctcccaaccctgccgtgatatgggttcctggaacctttgcatctgtccagtgggcacttctttggccacctagaccagtccatctggtgttctcaagccaaggcccccggaagatgcagcaggctgtgctgagtgggaatgaacacttcctgctctcattcctgcctggggaggtggagtgggacctaccacagagccagggctgagagcagcagaactatctagaacactcacgccagcatcctacccactgcagcgctgatgccggagcaaaccgcctctgctcaagggcttctcagcagagctcccctctgcagtccccacaggaggcctggagctcgggtggtttcccagggctggaagtgcatggttttcctctgtatccctaagcacccctgggcactgaggcacaggacatagtgctggggtgctgcgtaacctgcagatgtttccaaccttctaagtctcagtgtgtaaattcgtttcctgaggccatgacattaaacatggtggcttaaaataacagatatttattttctcacagctctggaagctgcaagccagaaatcaaggtgtctacagggtcatgctccctcaggcttcaggggaaaatccgtttcttgacttttctggcttttggtggccttcctgaggttgtggctgcatccctgtaatctctgcctctgtcttcgctccacggtctctccctatgccagctcccccgtgtgtctcttgtaaggacacatgtcatcaaagtcagggcccacctggataactcaggatgatcttcacatctccagacacttgattcacttatatcaggtgatatggtttggctccatgtccctaaccaaatctcatcttgaattataatccccacatgtcaagcatgggaccaggtgggagtaactggatcctgaggtcagtttccccatgctgttctcatgacagtgagttctcagaagatctgatggttttatacgcatctggcatttcctctgcttgcagctctctctcctgctgccatgtgaagaagttgcctgcttcccctttgccttctgccatgattgtaagttccctaagtcctccccagccatgcggaactgagtccattaaacctctttcctgtataaattacccagtctcaggtatttcttcatagtagtatgagaatggactaatacattggcaaagaccctttttccaaataaagtaaacatttacaggttccagggatcaggatgtgggcatatctttttggagaccaccattcagcccactactgtgtcctcagttataaggcacaaataataatactattagcctcataaaattatggtgaagatttaacaagacaatgtatattagacaagtgctgaaaatattcagtatagatattttaattttctctgcacatacatttaggtaaaaacaatatatagatcttgataatagagtcctagtgcacgtcaaacatttacttgcttagttaatcgaaaccatctctaaaggttatttgcgtattcagggtgaggtatcctcgtgcaaatcccaagacaaggtgttcccagggacaggggtagttggggtcattagaggggctttaaatatcactgatgagtcactttcattgtactagcaaaataagcagttcaagtacaagagctaaggtttctaagacacacatagacttttcagagaaaaatgcagcaaatggatcaagataagaagaagaaagaacaggattttttttaagattaaaaaaaggaaaacagtcatagatgtccttggcagagaaatggctgaacgcccaaagttgcatctcaactgtgtgcccctccacaggggttaacagaaaagctgaagggcctgagaaaaccaagtctccaacaatatgtgcagaataattattaattttttttaatctttgtagagatgaagtctcgctatgttgcccaggcaggtctcaaacttctggcctcaagcaatcctcccccttcagcctcccaaagtgctgggattacaggcatgaatcattgcacccagctgcaaaatgatcatatatgtaaaaagcaatagtctgtgcatgcatgggtacgctttcctgtgcacatataagcatggaatgatgacatacttctacctcgcaacccggatagaaagggccaactccctgtcccccacccaccagttcaccactgtcccttcagcaaagggacaggaatgaagagggagttttactacttctgtaatgtgtggcaatttctcagcaaagacggcagcagaatttgacagtgcaatctcaaaattaaggaaatttcacatccagctgtcaaaggctgtcaaaggacagctgggtgtgactaaggcagaggagctcctgctcttgtctgaacactactctcctccccacccccatctacagaacagaccggctcacagacaacctcccatactaattctgctgcaaggatttgggtaccttgccaggcaggtcctgggcacctggcagattttgaatgggagactgagtgacctgctgaccagccagcctcctgagacccactggcaaataccctgtggtcttagcatcccctgctccatccacttgcatgaggacaaaatgaagagcttcaaggtcatgcctggttagggatgctgggtaccctgggtaccagagtgctgtgcccaagggtgtacacgttctggtccccagcacggccgggcctgcagaggaggcaggagtgagtcaccacaaagctatgctgcacaggtgcagtgaaactgtgatatgctgggaactgagcccaggctgggctgtgggccctggaggaaagggggccggtcagcaccaatccccggggctgaaatataaaacacgctgtggctcgccctctctgagagtgcactggctttcatatttctgaggctttgttttgccacaatggatgcatttctgagttcctgtctttgtaaacagataccgttcaatgcggcgggtgattttcaggccatccgcctctctgctttcccacattttggaggagcagagttcaagttctagttcttgccctagctgtggtgtgatccacatgggctgagtccccattctgggctccaacctgctctgtgaaactgcagtcaatggggctagtgcgtgtctaaggacagcgggaagtggcctgctctgaagtcatccatgaatcctcttagtcattccccggggtgccctgatgctgatggacaaggccacacttagattcaagtatgcaaggaaggactgcagcatctaaaagctatcacctggccagcatctggagaaggtggtgctgggggcaggtgcctcagcaggagtggggaaggaaggaagtcacttcaatgaatgataatgaactttgcccaacatcctcctagctagaggagagtctgggtttcctttccagagactctgatcagacaaagaatcagcttttggttccatgctttcctggctctctggtgactggagaaggaaaacgaaggagatgaggtttccactgttgatcatcaatggggaatgccaaccaaattttgcagagtgttttgaactcccccaaaacccctctgcagtaggcaatggtgaatccaaatagcacacatctaggggcagtgaggacgggctctgcttgctaccctctgcagggggacacagtaagctgctctgaaaccccagctgctggctggagtgggaggcagcctggatgctccagaaactccaggcctgcttcataactcaccatgttgcaggaatgtgtcatcctcagaacaacgtcactaaaggcctgggggatttgcgtctgcctcaaaatcatacccggccttattttcaaatcactgcgcttaccaccaagagttgtgccctttcttttatgcatggcaggggcgccgggctaacacgacctgagctcccttcccattcaaagccacaccacggacacctgtcactacagctgctccccaagcggctgtgtgtggttttggccggtgtcacagtcactcaagcaccccggggtttctgggggcagggtcagcttgccctaagacaggcagagcagcagcagaggggtctgcgcatgggaattctgtatccttctctgcagggaatggggaatcccttgtccttagaaatctgggggcatctcatggcctctacatctaaaagaaccaggtaagcccccccttactcagtgccaatcctgttcaagtgttgctcaggggctagtgttggggtgatgagtgaggtgtttgcagtcttgggaagaagctcaatgttcaccctgtaacagaagttgagattgcccaggacaggaggggacggtccagtcactggaagcggaggggtgtggggtgcaggggatgcagtaggagagcgcaggggtggcgccaaaactgagtgcatggtcattcttcatcaacacaagcatgcagccttggtccccatgttcaccctccccgaggctcactttctccccttctgtgaaatgagattataaagtgactttcccctcataggactgctgcaggatggagagagacagggaacacagaggaatccactcagggcctggctcctgcacacccaccacggtggccttgcttttagtcttccctgtctagtgaagaatccctttacatctcattagaatccaacacaccctctgtgcacatgcctgccgcccagccccatcagctctctctctgcgggggtccttttccaggtgcagtagacagagagaaagattcaggtctcaggtgctcccaggctggggcgagactcacctgtaagcagattgcaacatgaagtagtgacagatgtttgcccagagggcctcgggagtgactgtctgtgcctgggggtattccccagggcatatgaggcagaggcgctctgatgctgtaacacacacagcaaacatgtacagagtatgttcattcttttttatcatatatgccttcattttccattcattcattatttcttggttatctaccatgtgccaggcacagagaagttttgcaatatgggaacagccctccattcagaggaagtgacggctcctgacggaggggctttccctgcacagggtcactgccctgcccgcctgtcctcacagtgccaccgtgggcctgaggctgcagctctcactgaggttcgtgccactggacagtctgcctggctgattcctctgtgttccctgtctcgatctccatcccacagcattgtcctactcacagcaccaaggacaggactggacacgctacaggtgactgaaagcaaggccgccatggtgggtgtgcaggagccaggtcctgagtagtgagttcctctgtgttccctgtccctctctatcccacagcagtcctattggtcagtcctgttgacagctgtggcctttggtgtggggagtgctccagggcgggtgctccagaagaggtgtttcctccctggcttcagggagcgctttgtaggagagccagagatggctgcacagaggccattagagagaatggacattgtaagcagagggaaggatgtaagccaaggcacagagggctgcgctactcagggtggcgagggagcaggacggtgccgtggggaactgtgtgctcagaagctaagcccagacaccagccccagagggctggcctgggaaagccaaccagagtgtctgagcgactctcattccctttggtgccttagcctgagtgttctgaaggcagagctgaggcaaaacagtatatgtgagtagtttattccggaacatgaccccgtaagcagggatgagggaaggaggggcaaaagcagcagatgcccagccaatcgaaggacacaccatcaaattcaccactgctgtgggcaatggggctccaccccaggacccctctggaggaccccgtgaaatgactccaaattatccactctggagaaggaaggctcctccgctgttggtcaggctggccccaggacctgctaagtcactgtggtttaagattgcctggcagcacagattggccggctgcacgggactatgctgcagtctcagaccctcctggggaagacgcgaggggcttgtccctgggcctgacctcctgcctgctctggttgcttctgtatggactagtcaccacctatgcagagtggtccctataaaaaggcttgagtctgagagttctaagttgggcacgaaagcagatctgactggggatttaaggaaaagcaaaagccttcagccccagctgtctgacatgggtctttgccgagggctagattttcccaaacttggagccaagcattccagggcaagtaactgatttgggaagtgcaagggagacagggaggggactgagtgaaggatggcacccagttaagggggtgagactggggcaattgataaactgggtgactgcagcttaatcccatgagaagactcccggaaacaagcatcccaggcttattcccctctaccagaggcgaggagctggggttcagacccatccatggtatcttacaacacaattgccaatccctccccaaagtccctgtccatcattggttgggagcagctcccaagggtataagctccctggctcttggggcctgccatgagggtagagtggctttctcaagttttggacaaagctctcagacacaggaacgcagattccagctgttctgtccagtaaagcccttgatccaggcctcagccacaggacatggaacaggactgctgcaggctgtcttgatggccaggagaggccacttgcaaacccttgctccaagtcctcaacccgggaaatcgcccttctgttcaacaagcacttcctatgagtctctccctggctctgttttggttttctccgcagccagcagcaccctatcaggcatgagagtaaatgtttatttgcttcttggattatggtctgtctcccccactgatctgatcagctctccaaggacagggattcggtcatactgttttatctcaagtgcctaacacagtgccttgtccgtgaaagatgctcacatatctgttgaatacaggaaataagggaaggaagaactgatgcctgagattctcggagactagctgtcaatcaatgtagtctcccggggagaaatgcaggtctcttgccacagcttagcataagtgtcttcccttggcttcccctgggccctagggctggcttcccaaagctgctgttcagtggcccatcgggtcgattcctctaggcaccatcacagccatttccagtacagtgtgagtcctctgtgagtcccggcaggtctgggatccatgccccggcccgccttctctatccaaccccagccccacggtcttgcttacacatagttggtggtgtaaagtcacggcagtattcaaaaggttaaagcagagtgaactgttaattttaatgctttctctaagattcagttttaataagcgaaaatgatgttcttatttgcagtaaagtggtgttataaaattctgtctgtcaagatcattttaaaaccatggaaataaatgatctgacaaaatcaggctattagacaagtgaggaagagtgatttccataaaagtagaggagctgttccttaatttcacacttggtagtcttttgggtcgactaaatttttaaataagtgataaaattatattagcgcaattgcatttttatagatttttttggtcattgtactctttttcaatccctttattttaactcaaactgttctgctgaaaggttactctcaacttatgttaccccataacagtcttcagcccacgacatggcctgaagctcgcaaatcctcagactgtccaggtagggtccagtcgaagcatgcgtctgagaaatggtcgttccctgctaggcacatgggctggggtctgtggtcctgggtgcagagggagggcagggaggccactgagggtatcctatggggctgggagctcacctgtccctgggtatctgagctcactcaatttttgctggaaataaaaaaaaaaagagaaataggaggtcatgttctccagaaaccctcattcttccaactcaagatgctgggtgtagacggcagctgtcactgtttgctgaaggagctgcatttagggaagaggagagaatggtggttcttttgtgatccatcacgtgcccaccctctaagaaccctcaaatcatcacatctccagcccaggccaaggattttgtctcagtcactaggaaaatccttagagaaagcccaagatcccaggtctcttgtgggaccaaaatatcactgatgggacagatgtgggcccagttgcgcgggagagaggaacgcttccaacttgacttttcatcactagaacaacttctatgatgtgcatctttcatacttccttctgctctgccctgtgctgattgtccaggttaattgttcagagggcagacatgggcctcctgcaggctcagcctcagccctgagccatctccagggcccagctcaggacctggggtctgcatccctttgctgttgtgattttggctaattctgagacccagccagcaacttctactcccctctgcatcctgagttcccctcttgctctgtcctgcccagtccccccgcccaggtctctgtcagattcaccatcctcgtctatgtctggtcatctcttgtccgtggtgccctgcctaactaagtacagccagtccggtgatactacataaagtgtactttggcaaattaccgcccctcctcttcagtggtcaggtctgggttcagaatctgagacctggggctgtgcagaagctgggagctcagccttggcatccacctgatctctgggctctgtcctcctggcatgcactgaggaactctggctgacaggctattctctgggcttcccagggcagcagctttttaaaacatgtactcatttccaggtagtctttttccaggaaaaatatgaagctccttagtgagagaaaacgcacctttgttgagcatctactatgtgccaggcacagggctaggctggcagagtgcagtcaatttgtttattggacaggaagggtgtggcgctcacttgggaagcacagctctgggaacaaaagaacattttgtcccagttagagaatggcctcctcttcctgaaacccaagtaccagggaaaaggagaggcaggctgtgttagcacttaggaaggcactgagcttgaactcaaaggttgtgagaatccattcaccacatgcatttttaaaattatgaatttagcccaagttttctcagcaccttctgtgtgccaagcactgtgccggctcctataatattaaatagaaggccaattttgaatgcggggcgtggtggccagggaaggatgcctgcattctcctagaggacctttcaggctgcactcttggctcaagagtaagagaagcaacctggaaacttatatcctcctgtgcttcaatctccccatcagtacaatgggtgctcagggtgcccaagggctctcccacccctggcgccctgtaggcagaacatctgtggacattaagaagccaagaactgcaggctgggtctgtgtgccctctgccagccactgaacactgctctgatattcaaaggagcatcttcagaactcagaagtcaaaaatcacattctccagagtctctgagaggcaatgcctgagcttaggggaatgttaaatttccagtgtttcctgcaaaagaggaagaagcaccgataggcaaagcccgaggggtggccttggagggacagggctgtctctcccaaggaaggaataaagaagtccaaattagtcatgttgtattacttctttttatggcaatgctctgaaagtctgcaaatgtcagcatgttaatttactgtcactcagtgatattatttcatcctttcaaaaatgtgtttcttgcattttcagtagcatactccaagtgttctccatctcaaagtttctatagatagtgcgactactttcactctgaccgttgccaaaatgtagaaattcatcgttgactgcagccacatatacgttacaagtggagctgggactcgggtttcctgcttacagaaaccgggggagaggtctgaattttctctgtgttcttgttctatcacctcttgtcctccaaaagtactctgtggtttctctctcaaggcacgtgcagagataaatttcatagagagatgttaagccatcagtcacggctgagtttgtatatgaagtcggaaccctccctgtctgcgagcccagccccctccaccccaatgattctcctatggtggcaaacttatttcaaaaattctgatgaaacactttgtaaattttgttattctgtgatgataataaatcattatagccttaaacacttctctagcttggagcctcagtcacaaattatcttgtcattctgaccaaaacattctccaaaaaagcttgacaagtgctaaaacccagaacatgaaaccatgtgttgttgtgaaagcaagattcagaaatgtcaattaattagattaagaggctacttttagctttacccgtgttgccaaataacccttaaaatatgcatagcagtggaaatctacctccgcggtacagtacttcagtgctgagggaagacaatggctcggactaatggacaaaattgttgtatctgtcagtcagctgcaaagaatgatctagaagcaaatgtcttgcttctttttccacaatgtgatttcacgagctgggtaaatgctaccatttatgaattcgaagagctcccccctcccactccacctcttaaaaatcatacacagatcaagaagaaaaagtcaagtcgttttcatatgtctttactagtaagataggtttttaatgtctttctgtgcttttttttaaaaaatttgcatttgcattttgaagttcactttgtaaaaaaaatatataccgtggagaaattatttaaatgtttttttatccctgtttcttgaaaatcttatctttaaataatctatatcctcaattttatttatgccataaactgttcctatattttaatggtctgtttgctttaaaaggggttgttggttttaatagctcagttgctatctttgtaaactaaactccttctgacgaaattcgagcagatcatctctgcctgtgagtggaaggcacattccaacccctgaaaaggaaatttaagccaaataaatgttctgcccaaattaaaatacataaaatgaatagttaactcggacaagagctgatggacgcaacagttgggctgcggacatgtgggtgttgagagcgctgactgccaggcaggacctcaggagagaaaacccagatgaaattaatttcctgtaaccccctttgtccattcctcaggactaattgatggcagtgctggcacggacatcttgggtgagcagaaatgaccagggcagacagcatcgtgaagggtggtgtgggtctctgccctgccggggtctgaagatggctggctcagaattgcagcctctgagccaggacttggaggtcccggaggacagggacaggaaactctcctccaaattctcaaggccgttgaacccaccttgattatattagaatccatgtggattctggcactaattttaggacaggtcattttcatggaggaaggacaaagaaatggcagggggtggggagtgtgggcactggatgagaatcctatgaagctttgcaaagctgcatggagatgtgacagcagcccctctcctcttggcattcataacctcgccacccgctgcccacggctgccccccagcagcgagcacgaggagctgcgaaggcatgaaggaaagctgccttctccccagctggagtgcccccgtcctgctggtcagggcaagacgtgccctgtggcaagtgggggacttattgggggagggacttcctgcatggggccacttcctgcatgatgtcattttgtgcggggccaagagaggggggacagtgtgccctgcagcaggcttccaggtttccatgtctcacagatcctgtgggtcccccccactcctcacatccccacccctctcagccagtcccactgtttctagctagcaatgaggcaattaatgagctgtatagaggccctaagttatctctggaactagatgggtaataaccacataaataagtaaataattaaataactaaataaaataaaacggatgagtgaggcaccagagctctagtctccatggaatgagttgtacggggtagcagaaacagtgggggaggagggggaggcccatagctccagccttggctctgccactgacatgaagtgtgtgaccttgggcaagtcactcctccttgctgggagctctcccacccgaccaaagaccccatgtagaataggtgccaataggagtgcagtggggagatgggagcatgaatggtttaaatgtagcaggaggcaggggtatccaaatggcctcacattccttcatcttcccggtctgcatctggccaaaaccttcctcctgcaagccctatgattgtggggacatattccacctgtgcacagggaagccaccctcagccagtgacaggcaggaggtggtggaccatcagctgccttatcctggggtggggccactcaaagatgagagtttcctgcacaaacctgcagaggttcctggggaccaagtaccagtggcctacagtggcagcttgctccttaatgcattgggaattagcttcctttttttccccatctgcctcctcctccctcctatctgaacgttccaggctcccttgtcaaatgaactacctgccctcaaatcctcacctcagtcccgcctgtgggagagcccagcctacaagacagatagggaggagcagggcccagggccagccagagagcggatgtcctgtctaaaatgggcggctgctgcccggttccagccacctgctgtcatgcaggaatgtggcatccggagatgccagaaatctcactgttgtatgaaatctcccaatcttcaaagtttggcaatgaattcaagttttgtgggtttttctttttttttttttttaagccgtgtggctcaagccaaacaaatcggcaggtcatattccatccatgggtcacattttgcaacctgtgccaggtaaaatattcattgcgcagttcaggtgccagagacagggccagtcaacgaaggttcctctttctagtaaattctggtctgcagccataacagggtataggaagtcatgatcaaaaggaccagcagtttttgggcagagaggcccactctgactgtggggtaggggtccccagctataccttgtggagagagtggccaggaggttctcaaggtcagcatggcccaccctgtacacttctggcccaaggaggaggagacactgcctgccccattaggagaacctgctcccagtgggtcacaaaaatcccatagccggctgggtgcagtggatcatgcctgtaatcctagcacgttgggaggctgagggaggtggattacctgaggtcaggagttcgagatcagcctggccaacatggtgaaaccccgtctctactaaaaatatgaaaattagccgggcatggtggtccatgcctgtaatcccagctactcaggaggctgaggcaggagaatcacttgaacctgggaggcggaggttgcagtgagccaaagttgcgccattgcactccagcctgggcaataagaacaaaactctgtctcaaaaaaaaaaaaaaaaaaaaaaagaaagaaagaaagaaaaagaaaagaaaagaaaagaaaagaaaatcccataccttggtttctcatcaggattctccctattgtaaattgaagtccttgaatcaggggtgccactccttgaggaatttgagaaggtcatactagggctcattccccctttagcaaactgaggccagacattattcgagatgcacagagaattacctaccagccctttgcatcccggactggaaccctaaacatatggcttgaacctgaccttcaggcagagccaggcctgctgctctgggcctgaaaacaggtgggaacacacctactgtcactattgtgaaaggaagcccctttcccctgaaggttgctgagccacacaaggatgggtcacccacaaagggaaaagtgcctgagtccaaggcagagtcagagcgaggtggggtgctgagaagggtggaggggcaggttcctggtgacatcactgagcacccatgtccagttgggcctgaagccccttatcctagactacagtcacatgagcccaaatcccttccttttcttaagatcctgagcaaattcctgctgacagcatcttgacaagcacccctggcccctgagcctggagaggaacaggtgtcctgtgagttacaggttctgcagggcagtggagagcagtgtttgttaactgggatccaccacaaaggcctagaggtggacctcagggagcccatgtccccctacacttaagcatcttaagcaacacttaagtggtgcttgcatccactttctcctgaggagagagactgtatctctcaaagggcctgcaacccctaaaaggtcaagaaactggtatacccagcctcatcaacataacaagaccccgtttctaccaaaaaataaaaggattagctgagtatggtggtgcatggctgtggtcccagctactagggagggtgaggcaggaggatgacttgagcccaggagttcaaggctgcagtaagctatgattgcaccacttgaagtccttgaatcaggggcgccactccctgaggaatctgagaagttcacactggggcttattccccctttggcaaattgaggccagaaattattcaagatgcacaaagattcacctacgagcccattaacacgacccttttcatcccagaccataaccctaaacacacgacttgaacctgaccttcaggcagagccaggaaggcaagagagcaacaccctgtctccaaaaagaaaaaaagttgtggtataaagttctaataaatccccatctgagacacacgggaatagaataaaatgcatttatctctaaaatggtaatggtgatattttgctttggacgattcagaaggcactccctaggatgtgacaagtgacaccatgagcctcaccatctcaaagcagggccagagggacatctagggaccaagcccctgtggtttccgccaaggagagggccagccctccaaagccctcccctctctgcaagctcaagtggcatccatccttcacagtacacctcgggccctgtccggcccaaggaagtgctcctggccggcccacttcaagtttcagggtttgagccttgcaatttcactttgttttctgcccaatcgtgttcttcattcactgcgtgttgtcattgacttggcatgattgtggactacatacatgtctcctctctccagcttgactccaaacttatgaaaggccaaggcaggtcttaggaattttcttcttgttcttgatgacaacacagggcatgagggccttctctcagcctgcacagatgagatgagagctcacccttgcctgagaattgtgcaagagatgagagctcacccttgcctgagaattgtgcagggtccaggagactgacctgggccctcacatgtcttgggggaaagctcctcagaccctctctcagaacaaaaccataggacctccatgttcaaatgggccatggtggtcaagtcccttgcaggccctgccctcactcattctctaggagtctggaagcgccctcaatcccccaccactccttcccctacccgtgtccccagagcctccatcaggcccaagcacaaggcaccatctcctcagcatctccttctttcccctgcccccactccatccacccttcccccatttctttcaagggtctctctggtgggtgcctcatgtctctggcttttagttccatttaggagaataagcccattttttttttcctggacttcagaagctttttgtccccactcgccctttggaagggagtcacacaggggtgagggtagagggcatttagagagcagaggctgtggccaggatatcagagcaccttctcctttgggatcattgccaagcactatgctgagcttgttgagaatggggatattgaaaacatttgagaaagctgagatgagaagctggagagagcagagtgaaggttggggtcatctgttcaatggtcacacctttgacaagtgcagtaagaaggcaggtgatatggtttggctgtgtccccacccaaatctcatcttgaattgtagctcccataatccccacttgccatgagagggtcctggtgggaggtaattgaatcatgggggtgggtctttcccatgctgttcttgtgatagtgaataagtctcacgagatttgatggttttataaatgggagttcccctgcccatgctgtcttgcctgccaccatgtaagatgcgcctttgctctttcttcatcttcctcaatggccgtgagacctccccaaccatgtggaactgtgagtccattaaacctctttccttcataaattacccagtcttgggtatgtctttattagcagtgtgctctctttctccctgggaccacccactggtgcagtacccccaggaaactctgggttggcagggtgcctctcatgaaaccagagccccaggagacccaagccctagtctcactgaaacacaagagccaaatgtcaaactccttccagaaccatggcccttttggagataggggctgggagggttgggtaaggctgtcactgggtggatgctccgtgtttctaaagcttctgaaaacagaagcctggctgatcttcctgattgacacagtggggcccaggccaggccactgatcccccaatcctcatctataaacaggcatcacagagattacagccctcttccctcctaggatggctggggagaaagacacaaaaagaaagtagtgaggtgagcttgtgccacccgagaagaatatcaggacatgactccttgggttgaaagcaatgtgggagaaggcctctgctttcttgggttgccaaaatataaggaaggacctcctgtacaatcttggctggaaggcttgctagagagatgagctctgagtctcacctttacggctgcctccccgggcaaatccatccatgtgccatttcaacacagggaggggaaaattcctgagaccccagttcaacagacacagtctcttgtaccccaagctcagcgcccactagagagagggtgggttgggcaaagtgaggtccccacaggtgctatccccagtaacctcagctgcacggagcagcccctgctgcccagcaggtccacacattgcaggaaagccgccttcctctatctccagccacacgcacttcttcctgagggctgtcatagcagcccttcaaactcatttgactgggttgcagctcatcacactgtcaccaactcagttttcattaggcggctgcttctctgttagcctagccaagcagaagaactcaaacacatgcacaaattaaatcgacatccaaactccaccaatatacaaagcaatttaaatgatactcattagagcaatgacaagccctgatgaggctttcaggagccgggtccttcagcttttgccgactcggtttcatggtcactgaggcggaagtccggcgaccgtacctccattttttttaagctaagaaaatgactccttcccgacagacacacctatctcattctctctcttttcctcccagctgtctcttggctcaagtttacccagccctggtttctggacacaggtatggccacggacaagagagtcacataaaggaaaaaaaaaagcagccacactgacttcttttttccataaatgctccaattaaaacagatttcagtttctcataatttcatttcacttggcctgggagatctctaactcacaattatgacggtcataaatgtgtccctggattcctgctgtggaagaaaaaaatgaaagtgaaatgttgaaatgcagtaatttaaaaacttaacccccccaaatttaagaagtcatttccaaagtcccatttatgtattttaatttttaaaaagaaagcaggatggcctcccccgctgatgcctggggcttcaaaggccaggacagaggcctaatggggtctgcagtggtgcctgggcagggagtcccagtacccccgcatggaggctgacagccacgccagccacggagccaagtctgtctccaagtcattgggtgcaaagaacagcacagggaccgcctgattcatcactgactaagggcagagcaaggtcacgactacatccatcagatctgtgggctttggagtttgcagcctagatcatatccacagcagggagaatgatcggcaacttcatacaccggtgcctgtacttctgtttataattttatgctcaaggttaattatgtgtgtccttggctttgatcagagatagtagcatgtgagaatgttgcctgtgcccatattggcaggataaggatttttagaaatacccatgaactggaaacacacttacatcactgagatgtgagctcttacccaggaaactgatttgtaaatcatggtatagaaagcattgtccaatgtccagtggaaatttgttggtttgtttgtttttgagacatcacaatctgcagcctcaaactcctgggctcaagagattctcccagtcctgcctcccaagtacctgggattacaggtgcacgccaccatgctcagctaatttctattttttattttttgtagagacagggtctcactatgtggcccaggttggtcactatgttgcccctggcctcaagtgattctcccacttcagcctcccaaagggttgcgattacgggcttgggccactgtacctggccttccaaaggaaccttctatgatgatgggaatgctctgtgcctgctgtccaaagagtagctgctagtcacatgtggttagtatgattgactgatgaactaaattttaatttaatttaaatctggatagccatatgtggctagtgtctactatattggacagcacaggttagaaggtaagtaaatgtatcctacttcctgagttggctaattgtggatgttaatctctggaaaaggatcacctttcttatcaccttaatcatcaggaatgatttattaagaatatatcagtacctgacattatacaaaggttgcagaaaagcagtgtctctgatctgctatcattagaatttaattcttttaaaacctggatttttggaccagaggtggggcactgacaccccaatgctgagcctccagaagccgtggacttatctaagttacccctggtgtccacagcagtaccaagactgagtcatcattagactgcctggtacggctccagccttcatggactgtcaggccgctaaccaacaatttggctaatctattgtcttggcagggcaggggatatagttctgaatcatccagcgctttgggatgcaggcccttggaaccatgaaagcccaccagttccagggttcgctggcctttaaaatcctcctgggggtcgcctcctgtcaaatccttagggacagaaaaatggtgcccgtgagtcaaacagcatctccctctggcttgtggaaactcaatggagtgtgagaaaaataagcaaactccctggaaacaaaaccctgggtttgatcgctgctctgcagtgacacccggaatccagccctcggctgcaacaaagctgccacacggcacgcaggaaggtgaggtcggttctatcacagaggagcttgtcttccctgaagctttatgctaagacagagcgctgaagccctacccaaatgagccagattatttccagagctaactatagtgtattttgcagaggccggtgagccctggcactgaatggaggtccaagcctgagcaccttttctgtgttttctgaggtcagctgaatgctgaaaggcatccaccagcacagggtcccagggggaaatgtatgttcaggctgcctttgccaaagattacacgtgctcactaataaatccccagggagaaagaaggctcctgtttccattaccaaaagaataactatctggcagagtaaagatggtaatttctccattagctaagacgataatagctattattttaaagttaaagtatttattattaaagagcggtgttggagtttgcatgttttcagtggtatgattgcttcctctaatacaaagtgtattattttcctgctaaatagtcaacagaataaaacgcaattgcaattttccaatctcaaaaggactgtggcagatgaatttgagaaaaaaaatcattggatttatttaaaaaaattttttttattagatgacttggaaatgtctaaagatgatagttttcatcccggacttgttcgatgcagcctggcttcccgtcagctcctgtctctctgccactcacgggtttctgtcttcagaattctgcttccccaagatggagctggacggcttagagggccttttttcctctataagtattttgtcaccacgtctgtggaactgtaggtggccagaggctggggatcagtgaagtcacctagctggaatggtctgaacttgaggaaggaaccacagagactgccgccctgaactcagctgggaaggctgtggacacacaacctctgtctgagcgcagggcagagaagggcctgtttggtggttatcaatatatatattttttccttttgcagaatgaaaatagaatagagatgccagggagattgggtcctcatcataaccaaccctctctaacttacatgtaaggattttggttaattatagaattcttgctgcctaaaacttaaagatacatcactgatatttttgctaaatgttgactgcagcgaattgctaagatgtggcatattgatttcttgttgtgaagtgagctgttcaagctccatttaagattttcatcttgcatgtagccctgagcacatcatagcaccataaattagttaaattgcacatttatcacaaatgttattttaagatactgcgtacatgtgatggtcggaagatatacagtaggactgcagcaagccggggcttgggcggggtgaggtcagggtcacccgcgcacctgtgattaaaacctccctcccttggcaacatcccccctcctccctgcacccatttaaaggcctgacttgggcgaccaatgccttcctccattcactctctcgcaacagcaaccgcagaacatgagcactacgacagacgcggagtgcgactttacaacttcctgtcttatctcagggaaaccagggccattctgggctggggtgaaaggttcttccggacagtggcccaatctttagccaggcaaaggtttggtaacctcaggacaaaatggccctgaatttccaagtagggggagaccgtaacaaaccatatccgccatgctgcctggttcatggggttgttattgtgccacgtgaggtttgcattcgtgcctggagccctactgcccaattctgatgtttctctagaggtaaaattaattcatggacccccacgtatatgagcagtcctttcctggctaaacgcccaaggtgtcaaacaagcgagagaacctgcggcctaccttggcttgtaaatcctcacaccaacccccaaattggaaagcccagaagatgatcctgggagtggggtgaggagatgggcaaagtgtgtcgagtcctcccaaactgtcaagagcggggttccaccgtcactcgtacaaatcccatctcccttcaagccacatgggccctggtggtgatggaagtgttgtcagtttaatctgttagatgcaggactttggattctaataaaccgatgctatatttaacctgtgaaaaattcaagcgtggaaatctgggctccaggatgtgaagatgcggaaggcacgggagggaggatgtctctgtcccctgagacgcattctgtggggagctggtcctggagggaaacatatgtgtcctttagctcctcccaggtaaaggtcagtaggacaaagaacaggccagaaaagaaccagggccagccacagagaagatggggcctggcacaggccctgcaccaggaggggaacctgctttcttccctgcctggccgtaaaacccacctgtgtgcccacatcccaaggcaagagcttagctaacacagcactctctatttgccaaacaactcattttaaattgtagtgagtttctccctaaaaacccggagaaagatggaatgccgagagaaaacagagtagacagaaaaatttggactcctcttgagaaaaaggggtggggatgagcggaaaaaccgtaggcgtgttgccgaacatctctgaaagggcttaaatttttaataaaatatgtgtttttttttttaagttgaggtgttttatgtattacatggatgtaatacatctctcatttgtataattctaggttaggagctatgattctgcataactgcaagagtagtttgaatatagtaataaaggtattttacaattttacatgatgttcccagcgttttgttggcatgatttgccggggctaataaaagcttgtgattatcatataaatgctctccccctcctcccatggatgggttcagtctcctcccacaacacccctgcctgcttatctgtggctgttttaacacaggagggagaaccttgggaccccaaagtctgtctgacccgattggttctgtttcccgctgtttgaaaatcctgagtcaacaggaaggagtcaccctttcaaagctttctttcccatcagcctccttgacagtgcagggccctgaaccccgggcatccagaagagagatcaaaccccagacccccatgcaggtcaccaggtgtgaccggaagctctgatcctgggggtctggcaatatcccttctgcactgagcatctaaccttataggcatatcttcctttcttgtgaatgtttattctcggtgcagatcctattcgagctgcctctgagtaagtgctccctgctctccaaacgccaaagttcactaaaactccccctgatttacgcacagcttccgactgccagcacctggcagccgcagcaaccagctccgtcataaacagatcgcatacaatttaattttaatgtgctcgttagtcgtagcacatttcagacataattgtgaacgcaacacaaaattatagcaaaaagacaattttaatgctgccgtagaaaaaagggttatatgaagagtcacataatggtgcttcattgtcaacaaccaaacagggcacagagtgtgttacggtgtctgtgctgtttacatgccaatattttatacaaaggttctcatatggtgtcagctgtcagttacttctgcaaattaactgccaaaaatggagaagaacagaatcacttggagagccggtaaccacgggttacctttcataagcctaaagataaagctgcagtgtgggatcttgggagaataattaggaagaacaaaacagaaagttaccaattgaaatagaaaggcatcctacaatatggaatagcaaccaagagggcttataaataagtgaaagaggttggatcacagaatgcctcatgacttttaagcaaagtattacagtacaaacattttaaaggctttatcaatgtttaggaaatacagtacaagttctttttttttttttgttcttttttttaaccttttcaaatagacttaaccctttgagcactgagtttattttgagtgttctttgatttctaataaatacctttaaaaatcatgtgcaaaatagttctgatgcctgccagggatgtctttcccggtctcgtttattcagactgctcaaaacaaatgacaatatgatgctaataaatatgtataatttaaacatgaacctctatcaatatagatgtactgtatagcaaaacaaactatcatactttgctttcagataatgtttctgtatactttataaatgctatctgtggtatcttctgtataatttacaatgtttgcatgtaaaaaacaaaacccatagaccttaaaaaaaagaaaaaaagaaatatacactatacataggcacagcttatgcccagagcatagcaggtgcataaaacactgttgctataaatgcaagaaaaaggtcatttaaccacaatcacattttttttcataagagagtctgaaatctatacaatatatacatctatgtttcaatgtgaaaataatattcttttaaatttcaaggcgtgttatacccctgcagacctgcataaatggaggttcatattattcattataactaagctggtaaggagtttaaaaaacagagcttcatacattattattattttattttattttttaaccaaattaatgcaaaagtgcttcaaagtactcagagggctaaagatgaaagggtgagaaatgccagcacactcgagtctcgtggaaaaggtgtgcctgattccgttataaatgcttaattaaactgtctgttaatgcatgcagcttgaagcatcgggaggatgctcacaactaaatcccgtttacacaaagttccaaacacttaccactgcattttaaccttcatattttaccagtaacaacagctgattatgcacctctattaaacactgtacagttatacaaaacagtccagcccagagtgattctctgcagttaaaataagaacatgtgccaagaacaacaagtcagagggggcctgaaggtgccttccacagtttccctcaaagcaaactgcagtcctttctatcaaaagcaaatgctactgcttctctaactcagagacatacagaaggtggtcttccggagatttcccgtgtgttttgctaaggtgaagtttaacagcgtgcttgctggcaaaggtccgattgcaaagtttgcactgataggaagtccccaggtcttcctcgggggaggacgtcaccattttttctgacggtgacttggtttgtgctatctgactgttaatctgttcggtggacagtttggataagtcccgtagccggaagcctaagtgtgactctaggtgactgatgtacgtggaaggagtcctgatttgggacgcacaatcgttacaaaagaagacggggtggccagtgtccaagtttttgaggaactttgttccacctgtccttcgaagctggtatttcacgttggccagccagtggctgatggtggtcatggacagcccggtgaacctggagatatgcatccgctcctgggggctcaggtctgacatgatgtacttcccttctgaggtctgccggaggctggcggcaaactgggcctggaggatcaggaggtgctgggggttccagtttgactggcggcccttcctcttctgggcgggcgtcgactcctcagcctcctccagagtggccccgtcaatgtcagacttctcggagatgctggaaggagtggaggattttgacgtgtggctctctgtcaagttcttcagcatatcggatatatctgacaaggcattctcgcgtagcggcgagtttgacatgaatgatacgacggcagatgtctttgccgttgtcaccgtggatgaggaggttgccggggctgtggacgtgggtgacagaagcactgaacccaaggagcagcctttgtcactcttcccttttgtcaagtctatgggctggtcgttgttgacgtggtagaaatagcggtcgaggtggtctgccttcttggactgcaggggcggcggggtggccacagcagccttctccgccaggctgttgctcatcttgaaaagcatgctcatggggtccagggcaggcagggagggcttggcggccttgcccaggtgaatgttcatgactgactgcagggcgctcaaagggttaacaaaaggctgttcaggcgggtggtcggtgatgatggccgtgctgccactcaaactgctggctaggggcttcaccagctccttgccattctccaccggctcagcgagggggctcccatccttgcacccatcccgcggggggctggggctgttctcctggctgcggaagcccccatcgctggatgcctccatcttgatgggttccccgacttcgctgctacatggggagggagtggcccgcttgggcggggaaagcttcccatccggctccttcatcttctcctccactttggcaactttctcagtgacctttttcaccagctcctccatggcatgaaagtttgtcttgggcatgggggacgtctggctgctgggtggagagaccagggtctggtttttcgtcggggagacaatctcactgttgccaaacatgggtttcaggggcgtgctcttccccgacgagcccagggacaacttcatcatgttgggaagttggtaggcggcatggatgctgggatagcccccccagctaggagtgccgttctgggccttgttgattgcggatgtcactgtgttttccaaggatttgaggatatcaagcccccccttgggactctcttctaagtcattttcagtcaagtaatggtatttggaagagatgtcacacttctcctcttcttcgccaggcttgtctttttgcttaggtttctcgtcagtgaccgctttctccttgtcgacttccttcttgacctccacattcagttttggggagatgctggcaggtgtattggagggggacgtgaaggtggtggctgccaggggcacggactggaccttctcatccagcagggttgtgatggtaggtgtgacaggcgtctccacaatgggcttcccctttttcatagcagagttggtgaccttgatgaagtggccagtgaccatcatgtgggcagtgagctcctgcagggtgtcatgcgagctcccacactccatgcacttcaggatctgcgacttccgggcctcaaagtgccatgcatagctggccccattctggtggccgtaccgattatttggcgtgatgtaagggttggagttcttctgaagtgcatcgttggtgtctgagatggtggctttgggggttccacctgtggaatctggggagctggggagctccagctccagggaagctttcttccgagtggcagggatgattttggcggcgacaggagtgacgggttccttcagaggcactttttggtagtgttttgttttgatcatatggacactcaaatcctgcagggactcaaaggagtggccacagtacatgcacttcagcaccttctgggcgtcttccttcccttccatttccagcaaggagcgtttgcgaggcttggaccagcgcttggggttgttgttatcggtctcatggttgtcgtcgcggtaatgccccgtctcgttcatgtgcaccgtcaactccaccagggtgtcgtaggcagcgctgcagtccttacagcggaacttgctggcccccgtgaagatggagccatagagcttgctgctctgccggtacagctgcacggtgctgaagaggctgggctccgggagcatgcggctctgtgacacctgctgcagcgtcttagccatggcgctctggtgccagtcgaagctcccgctgccacagctgctgctgctgctactgctgctgctgctgctgccgttgttcttctccgaggagggctggtgcaggttgaggttgaggttggaccagtaggagttggagaggaagttgttgtacacggccttcatctgctccaggctatccgacacagtcgtgtcttccagtgggaccgtgacctccttggtctcctcttcgttcttgatggagccgctttcaaagtcagccattcggtcactggtctcactgatgtgtgactcgctgtccatttcatggcaggaaaactcggcggccggggagttctggtagctggggcaggccctggcgagctccttctccgggcacatgtacttggccgagggctctccatctgccgtatgctcctctgggtctaaaccttcgtccaccagggcagcagcctttaactcttcggaaacataggctgccatgataacaggtgggaaagagagacaggtaggatggaatgaagagagacagggagaaggagagaaagaaaaaaaaaagcattagtacttgttgatcttacctagaatatgttctgggctctcaggaaaacacagcaacccagatgggtacatgtatttgtaaaattaaacagttaaaatgtggtgtttctttggagcaaaaaaaaaaaaaaatctgctcttcaaacataatttgccaccttattcttctcaaggggcaacagcttgaaattaaaactaaatttgaaattaatgaagcacattctggaggtggcattcatttctaaagtaataaattacttgtatcaacctcagagacagcagttcctgtctgtcaattaatatgtcttatgcttctcctacccctaatgcatttcttaacagacagattcacaatttaaattaagcaagcattttttactcattacatttttgaggctcaatctttaataaatataaagtataaaaacatcaataaaatttttaccaagtaaaaagaaaagtacgtccattgtaataagggaaaaacaagattttgtggctttttttttttctttcttccttctggaaaagcaggtctcagaaaagcttagaggtaggtttcctggcagggataggtgtgggttcgttccagttgagaggaaataccctgaccagctaccacccagcccccagccctgtcccccatgtgaacactcagccgttctcagccacctgtgcacacacactctccatgcagaattatgtcacaacaagttcaggaaaattggtatgcggtgctcattcctgatgtataaatatatacaagaccttccagtggaccttacaaatgtcaaagtgtttgctctttagactactttgtcaatatttactcagtataagcttcatgggcatccaacagagatcctgtctttctggaagcgatgtaactgggatgtaaatccagcatgcattcccacgcaggtggagggcaggccacgcgcctgcaggttctggaagatgcacgtccagagacacagagcccagagaatacttgcgttaatgcaacagggtgttttttttgtttttgtttttgttttcattctcttgcattcggtgacttgggttattccttactaaactgatctgccactgcatactgcatcagggtagttttttggacagtgaggagtggccagccctgtggctaggaacaatttcaaggtaaaggaaaaggagaaataaagtgactttgtcctgtcagcttctaaatacttgtttgcttcaaaaggccagtggggaagtgtgttaagtggttggaacgttgcagtgctaattgcaaggctgatttctacaaaaagctcttaagaaaggaagggaagttttgtttgtggaattgactccaccagctttaaagatttgcccctgttccatttcacatcagaaaaccaacaacaacaataaacaaacaaacaaacaaaaacagtgaaatgagtcccttgaagtcaagcagataggcccccctcattccttccaggacaggtgtgattcttttgctcctaagccccctactttgagtgccaagattcctaagccaagacacatggaatcccaacactgatgtaatgtgaacttggatgggaactgccccaggtacacacatcagctgcagggagggggatacttctgctcatttgccaactactaagcaagagtcttgtccaggagccatggatgttctttacaaatgaccagaagagagtgccctgctgcagtcagctgagtgtgaagtgctgtggggaacctcaagtttaaggccatgcactttgagatgacaaataaagacagcaaaagctctgttcctagggccaagaccaaatgcttagggaaatacggcgctggccaatggaggctcctgtgctagccacagtgaagactgtgaatgcatgtgttggaaaagaataggaaaagaaaaagaaaagaagacatctcactctccctcacctgccccccgacagacttcctcggcatgcagcacattctagaaatctggactcaaaactccaatggagtggcaggcctggaggaagaacagccgaggtagaataaccaagtgtcccaatttgcctggagctgtcctggtttcagcactgaatgtcttgcatcctgggaatttactcagtcttatgcaaactgaaggatggcttgttaccctagctggggcacacagtatgactgaggtcagagcatccaggtgggtctgcaacctctcttataatcctctcggggaacagctggagcagagtaggctgggtttagctagacacagcccactgtctgcagaagtgcaccgggtgcatgcatatatgatgtttccatagtacggttttattgtaaacggggaaagaggaggaaatcccatggctggtgtccctcccactgagactcaaggaaatgcccaggcctgtgtagatgggtgaagatatcaaagccccttctgtcctggagatgcctcttggagccacagtctgcaatacaaaccccacaccctggggattttgctcctattacagtggctcccatgaaattaagtctgagagagaaatggccccacagcagccactacgagaggacaccagcagccagaagcagcagagccaatagtggacatgaaagagtcctctgtgggtgaaggccaccaggtgagagggaaacccaggggctctgccagcccacattccacccaggggcaatgcatctccccatggccagagccttccccacccccactgcacaagcaccaaaccagcccaggccgtccggagcacccctccccaacacatgcaccatgaatgatatgaccagctcctctcctgggctggcccacaacacgctctgatatgctttgtaaactacacagcagggtcagaatgtcatcagtctgatgactgaggaggaaattaatatggaaagaaaaggccaacctctcaacctccctggtggaacaagatccaactcagaggagaattaaaaggctctggtgccaagcagaactgggtcctggagagacctggcctcaccgcacaccccactcctgaccatgtcatggtttctgagggttctttcaagcgcacaccctcgtggctgtgacgtgggcctcactccctgttcaaatgaccattttcttttccgatctgaaggtgagaagtatttccttaggtggagcctaagacttttacccactggttctcccctccacattaaaataaagggaagggctgggcgcagtggctcattcctgtaatcccagcactttgggaggccaaggcaggcagactgcctgagctcaggagtttgagaccaccttcggcaacatggtaaaaccccatctctactaaaatacaaaaaaattagccagacatggtggcacatgcctgcagtcccagttactccagaggctgaggcaggcgaatcacttgaacccggaggtggagggtgcaagtgagccatgacccaccactgcactctagcctgggcaacaaagcaaaatcctatctccaaaaataaatacataaaaataaagggaaaattcccatcttccaccatgctttgcaataatttcactactctgagaatatttatactcttgattactgaactttaaaaatgttctagaaaatggaaatggacccagtggaatgagggaactaagggatgaaaggcactccacaaatacgcatcaagctgccacaggcaccaggcaggttgccgcacactgtgcagtgcagagttttgtttctctaggcctctatttccttctttgaatgatacggggcacttgggtaatatttgtaacgtccttcctcggctacatgtctatcattttatggcctttcagagaaggtaaagagccgagctgtaaagtcgcttaatctggttcattctctgcaaacgccaacctcaccaacactcagcaagtggagtagttcctctgtgctttcttctctagactgagcttgacacgcaaagcccctggctggatagaaggaagggctctggaagctggcacagcgaatgccctggatcaggcaaggaggggaggaaagactgggtgttcccagtcactgtgcagatggtgagaagtcaacaggggtgtggggcagggctgtcgagaacctggtccccaccaggctggcttcagtagcccaggggtaggcaccgtccaccgattcgacccaacaatgcatcacatgtgaccttgggaaattccgctactgtctccaacagtatttgagagtatttaaattccttgttgctacttaactttctgtgcattcttgcctgaattctctaagggagggaaccttacttccttagtcttgcatgcagtagctgagcaatggacagctgctgcctcatttcaagtaggtgagtggggggtcatgtccaggagcaaggagttgtaacagcctttgttaacaggatcccccattctctctgcagcctcccacatgggcccagtccagccactagcatctctcaccccatccccaaccaactccctgactccagccccagcccctttaatctcatctccaagcagaagctgctgagattaatatagaatatcaggctggtcatatcacctccccatataacaccctcagtaacttcccactgggctcggaagaagatccaaattcctcaaagcagccctgaaggaagggagtcctccaccatttgcccggttcccctccagcccctctcagcttctgagatgcaccaagatctctcattccttactttctagcactgcctcctctgctggaaaccctggggcaggtgcagtgaagtggagaatgcgggaacccacccttccccgggcctcagggaaaaggctcttggggatagcagggttttgaccccagcttttgtccccttatccatggggatcacttgtgtatggccagatattccaacacattgtcagctttgtgtggtcaggacgagaccccacacacccacaccccagttatcagccgcaaccctaccgtccggcccagagtggccactcaatacatgtcaatgggacgaatgaatgaatgaatgaatatcatagacagctgcttcacacttcctaaatagctgccaaaacatcctgaatggatcctgagtccagccagtcccagtgcaaagcagatgtgctggggtgagacccaaagtccatcctaggcaagttctgtctgagagtgactggcacattcagcaatgccacttcgtgattaaaggtctctggggtagacaggatgacagaacccaccaccaaggaagatgggaggagacaccccagtcggtggtctccttgcattggagcctgcccaagctgtgcccacactcaaataccctcttcaggaatgcattatcggccaggtgcagtagctcttgtctgtaatcccagcatttgggaggccgaggtggaagaaatgcttgagcccaggaattcaagaccagcctgggcaacacagcaagacctcatctttataattcttttaaaaattaaccgggcatggtggcctgtgcctgtagtcccaactacttaggaggctgaggcaggagcatcgcttcagcccaggagattgaggctgcagcgagttaggatcacatcattgcactaaagcctgggtgacagagtgattctgtctcaaaaaaaaaaaaaaggaaaagtaggccaggcgtggtggcttacacctgtaatcctagcactttgggaggccgaggctgggagattgcctgagctcaggagattgagacaaccctgggcaatatggtgaaactccgtctctactaaaaatacaaaaaatcagccaggcatggtggcgggtacctgtagtcccagctacttgagaggctgaggcacgagaattgcttgaacctgggaggtggagactgcagtgagctgtgatcgtcactgcactccagcctgggcagcagagcaagccactgtctcaaaaaaaaaaaaaaaaaaaaaaaaaaaggaaaagtgaaagtgaaagaaaaagaaaagaatgcattatcatccctctatccctcttttctcttgagcaaataagatgggaacctctgctgccagctcccatggaggaggcagctggactgtgagggggaggaggttctcattcaaaccaaaccaacagctgcaaagatgcaaagaagcacacagaagtgatcagggactagcaagtgagaggccgactgggcacccgcattccacgcttccccaagtccctccattgaaagagtctctcaagatgtgagcccctgcggaatggctgcacccgcttccccacacacatctcactttccttaccccaccaatgaagactgtgtgcttaaagcaacaagacagccatcgatctctcaagagctgagtgccaaggacacatttccagacaactgcctgaactgaagaacttggcatgcacagaaccaaatgtgactcctgggtagagacacacatggatgagaaataaaagctcccaaagttacaaaagctttctgcaaagttctatagcccaacaaccttggaagcccacatgatggaaaaacaaaaaaacacaaagacaaaacacggatcctgcctaatatgagcatgtttatgagctgtgttcacattcacacattcattgcatctggtcctctcaatggtcaaggaaggtggaaaaatcatctccattttgcagacaaggaaacagggattctggctagttccacagcacacttgcactgaggaaccagttctgaccccaagccctctgctgcaacccctcgggatgagtcactggaggtagatggggcatttgcctgaactcctaagacccacacccggggtccagtgtcaggggaccacacaggaagtgtgggagggagcgccctgtccccggaatgaggagtgggcagccacgcagaaccttctcaattcccccattgggatccacacctacccttccaggagggtccagcatccccaccctcagctcaccagtggtgtggctttcacaccgtggatgcagggatgacaaacgtatcatgtccggggagagaagagagctggcccaccgtggccatcaagggtctggagacaccaattcgttaatatttattgtcatcattaactaaattcaacctctaggtaaaaagaaattaatatgtgtcatataaatataaaacagtaagctggggcataacggaattcatttctgggcaaggtggaattactttcatcacacagttaggaatctctcccaaaagataaagaggaagtgttggctgggacctgcactctccaaccacgggggccacggatgggcaagtcgtgggtgggagggggcactgggtgtgggtggaaagaaaggaaaagaaagtatggctgtgtcccgctccccaatgcaatttccaagtaaaatgccctgtgagagttagcattttctgggctgaaataaaggttctgaagttataaccctccgtttcccctgggaaggtgctttgctggctaaaactgtttatagattccttttccgcatgtcttcttattacggatagcccagaagaacacccctctttgcaatgagtgcctctggtcatccatccataaggagccctgtgactgtgatggaggaaagagtagagccaggagggagaggaagaggcagggaaaggagaagaaaggaccgaagagggaaggggccatcaagtcatccagggtttgagaaggggtcagagagagaggagggggcccagcagagagaggacagagggagaaagagagatgggagaggaagagaagaatccactagggctggcgtaggggagagagaggccaccaaagggcatgggaggtaggaatggagagagagaacacaggtaatggagatttgagaagagacaaggacaaaagaggttattttctggaaaggactctatgacaaagagggcctggagcctgtgagttctggtacagaagtggccctcaggatggccaccaaggtaaaagaggatggacctaggggagccgctatgggtccattccaatgctggggcctccgggcctcctttcctcctgcttccctgaatactcagattttcaaatgacagagggtgatttctttttctgttttttttgagacagggttatgctctgttacccaggctgaagtgcagtggtgcaatcacagctcactgcagccccgaactcctggactcaggccatcctcccacctcagcctcctgggtagctaggactacaggcactagatacctcgccaggataagagtgctttattgttttttgtttgttaatccttttttttatttaaataataatttaactagccgaaggggatggaggaaggatgatggcttgggaaggtggctgtcaggtgtgttttcccaagcaggctctccaggactcatgcacaccagtctctgcagaccctcctgccctttcctcagagccagaatcaacttcaacacatgcctaagccctcagcaggcacgaagtcctcttctctgctgcagaatgtgcttggacaaggaaaaatgccaagaggctcacaaggcatcttgaccacttctcactccccacttacctgccttcttcacacttgggcccacaacagagcagaccccaaggaaatggcaggaggagacaggaggggacagttcaaaagccatagcaacccaatgtggagagccgtccaagagggcagtagctggactctggagaggacctgccgattctctgctctgtcgcccagcctggagtgtagtggtgtgatcatggctcactgcagcctctaactcctgggctcaagtgatcctcccacctcagcctccctagtagctggaactacaggtaagcaccaccatgctaattaaaaacaatctttttttagagttggggtcttgctgtgttgcccatgctgctctggaactcctggcctcaagtgatcctccagcgtcggcctcccaaagcactgagattacaggcttgagccacggagccaggcaggatctgctgtttctgcattggatttttctctgggaaacaatgtgatgttaggcagggaggccctgggtctcagcttctgccctgccatggattagtcctgtggctgtgatgactgacttcacatctgtgagcatcagtttcttcatcaacaaatgggaggaaggaatgggaagatgcaactggccacatccgcctcccaggtgtttgcaggcaaccaaggatttcataaggagtgggcataaaggacttttctaagttaaagaaactctgcaaatagaggtgcaccaactgcacaggggctgtgctccacacagctccacacagaaggcctcctgctgtcgggaatctgggaggcacggccaggggatgacccctaggctcacccctcctcttgtaaaggcctctgggtctcccagaccctccatgctgacctcatcacaaaaggaggaggtggggggacaagcaccaagccctgctggggtgagagctcccactggggcttgggttctgtccctcctcactctgggcagccttaaaatgggggctgcagaaaaggaagaaagccagacagaaaagagaagaaaaagggagggaaatggagggcaaggaaaggaggcaaggaaggaagagatgatgtcagaagcacgcctgcagcattagtgttcctgaccaagcacagctctcctccccgggccccagcccctggtaaaggaattctaggaaggtagcgggcaggaccatggattcagtcccgctccatcccactgcatggatctgactggagatccccagtgccccactcccaggggtggggttcggagccagatgccctgcagcacggttctggctggggcggcacctcagacactggctctcagattggctgccactgtccctgtagcccctagcccccaagctgggccgcgttctcctccaggctgagcccagaccccatgtccgctgggcttctgccttgaatcaccttcctctgtgtcagggaaagagctcaaagtccccagaaaatttcacctaaatctcagcttattctcaatacacctggaaaatctggatgaattgattcatttgacaaaagaatatctgcttgacaaaggactcatggaagtgccttacacgctgtgccccctgggttatgcttatacagggctctctgctgtacaaacgtgctgcacaccttgctatgatgaagcaaggggatccccttctcaggggaaccacacctgccatatcagctgtgtctgacgccacccgatttagggcctagagctatccccagatgtcctgaggtcccacacaatgggctgctcagaagcagctgcccctagacctggcccagagccctggtgggtgtgagggatagacagacagggaggaagctcaggcctggattgccactaaccaaacacattccccctggccctcagagaacatgacaaatcaagatggaggtgcaccctcctggctcttgaccgggaggggctcaaagcaacagtgtgaaggcaggacttcctttttgtgcaaacagagagaggagatggcagggggaagtgtgggatggaatggagggggcttagctaaacacacactggggggtaccaatatgcttggattgcatgttgggcttctgtctagttattaaataagcagggagaaaaaaagggttctagaggactgtttatacctggtaccgaggaggtgacaattcagtggggaacacaagtcttctccatctatccacctgggcacccggagtcacctagagacgctacctaggatgatggaggtcatggcctctagggacaaagagaaaatggcattcttggatggtaccagggagaccaggggccttccaggcatcgctgctgggctttggagctccccagaaaccaggggaatacccaagggccagaggatccagaagggcatggtttggctctgggggaaggaaaagtggctgcagctgtaatggccaggacttctgcagaaggctggccatggcgggatgacaacctcccctagattgattgctcttcccactagcaaggtcaggaatattaattttgtacacgctaatttgatgtaatgtgtgagatgaatgcttgttcagttgggtatccctgtgttaataaagctgcaatgctttcatcccaagaaaagcatggcattagctgattggtgaataaagtcagtgtgaataaggaaacaccatgctttagcacagcccgagtggccagtggtggcgtaagccaatgacaggctgcggctgctcctctagggaacccatggcaacgaggcttcccagaacacctcctagctgctggaagccccagccggttcagaagactcagagcccaggatgagtcctgttcctccagcggtgatgggaaacaagagtccaagagttccagaagccaaacctggggctcccaaaactgagttaagaaagacactgcctgaagcttctttctttgaattcttgctgcaatgaaagaaccccattgtaccaccgtctagcagctcctccccagaacaatctccctcccttcccagcactcttcatgagggggatggctcagaaaaggaggaggccagaacgtcaggaagctctccaagatcagaaagagaaggcagcttccctgtctctacaatgactctcttccaatgccttctggggagcttgctctgctgcagttagggcaccaatcccagtacaaacaaaaataaatgtatcaaggaggcattcacaggacaaaaaccactgcctcagacaaatcttcagataacaaagaataaataaatactcactttggggaccatctgagtcacctactgtccttggcttcaagcacatttaaactgactgggcatcaaaccaatggtggaagcccgcacctgtctgctgtcatggggagtccatacactcactctgtgtgccctggaggagtgcttcactgctgaaatcaccttaatccatttaagctacagggcagagtcatcattcagccagcccggtgctgggcccatatctgggttgacagcaatcagtttgtcctggtagccagcgacggtctatacagtgaaacatggcttccggagccagggtgcatttttgcaagactggtaaaggaagtaagctgcctgtgggtgccgtattcccattcctctttgagttcaatacatttccaagcacactgccctctcagaataaagaatccagggtctgaacctcttcccaatgtcctttttaccttttattctacaaaagccatgaggtaaatcctggcctatattggatccaataaattagaagagtaacttcatccaaagaaaggattctctcatcttggtggaataggaattgggtaaattattaggggcaggggatgtgcttgaccttctcaaattgcatacatgagcagagggattctcagggggtagctgatgtctttaacaaggcagttcattgaggcagtttatggaaccaaggaactcttgcctgcctatacacttggtgatctaaaaacctgggaaaagcacagttgagaattgggcagcaggctgtgaaaatttgggaacagtccttaaaatgggcctcttcaggtggctaaacatgtacaactcaaactgtcactgggacttgctggctttcctccaaaatactaaaagagctatatccaaggggaaggtaaatggatggctaacatgagatgggagttaagatttacatggaagacgaagcaactgattcactcaacacatctacccatccacccagccaaccctccatccatctacccatccatccatccatccattgaaagacttattcatctatccatccaaaaacctatccatccaaaacccatccacccatccatccatccatccatccatccatccatccatccacccacccattcatccatccaaaaacatatccatccatccaaacacccatccattcatccatccatatatccctcatctgttcatctcattcttctagccatcccaaacccatccattcaaaaactcatccatccatccacccatccatccaaccaaaaacccatccatccaaccaaaaacccatccatccaaccaaaaacccatccatccatccatccattcaaaaattcatccattcaaaaatgtatccatccatccaaaaatccatccatccatccatccatccaaaaatgtatccatccatccaaaaatccatccatccatccatccacccaaaaacgtacccatccatccaaaaatccatccatccgcccacccacccatcaacaacccaaaaacccatcctttcatccaatatgtattagacactaattatatactccagatgctttagggttaggaataagtaaacaaagtaaatagctcagaattacaggctatacttttatgtactcaaggtggccttggttaaacacagagcacaagggcattagagaatcatacatctgcacaaatgtcttagctcgatattcaaagcccaggttaaccaagccccactttaccttctatgttttattgtccactgccccctccacacacagagatgctagtcttccctgataactttcctttgatcttgccttgattgatgctgtttcttccattttacatatcatgcttggtcttttcacattcccctccctgtcctccaaggtcctgctcattccatgtcccccaggaagtcctttctcacctgtctcattgaaagtgatctctttaatttctgtgatgagacaatgaatggaaaagtcccctctaaactctaaagcctacagaaatataagaaattatcagcatcattgtatatctcttctggcatttatctcttgtagttttagagtcgctgatcctgtgcataaattctctttccatatacactacaggagcatttcttacctctgtgccctttgcatggcctggcatgacaactgtactcagtaacttctggtccaattcttttagtttggatggcgctgcttaggctaagaaccaacaaagaccaagggtcacttcaggtagaagtttccaccaccttcctcaacggctctcgaatgctgggctgagaagtcccacgtgctctctgacttcccatgcatctcttcattcctcattcccacgtcacagaacagagacactccagtaagaaccagggccaccagggtatctcagttctggcgaagttcctcatcttatgaccacaaggaaaacttggagagaagatgttcccagtgacctcagaaaagtttagccctaccctttctgcactgagcacctgcatggtagccaccatgactaagtgaccttcttaaggtctgtagcactgcctgcattgagccaggactgatccagcattcagccagcattgacacagtattcagccaacactcagcgaattctcatccaggactcagccagcacttagccaacactcagctagcactcagccagcactgacccaacactcacctagcactcagccaggactcagccagccctgacccagcactcagccagcggcactcagtcagcacttagccagtactcagcactcactcagcactcaacaagcactcactcagtattgacccagctctcagttaacatgcacccaggcctcactagtgtgcatgtgaacactgtttggatggacagtgaaaaaatcattctagcctgcttgaaggaacaaaggtaatggtcaaatgtttcaatttttaaataattttgactgacatatacatgcctacagatttcaacctcatgtctatatattaaaacagcttttctccaaccaatatataatctattgactggttggcatcacaatatatgtttcctcttaagtatcccatctcacatttttatattgacacttatatagtctgagttgggtgtttcttatgctagatcaggaacccttaacaccttaccatccatcacaaggaagagagacagaaaagagagagagaaaagaaacaatataataatgagaacagcactctcactaactggttcatgccttgcttgccttcttgtggagaataattttgtagtatatatcaaaattgaaaatatctacactctgacccagatagcaatctttactacaaaaacattcatacatcatacatagcccctcaacaataacaaaaaaacccctctatgattaagggtgttctcatcagtatttcttagaataccaaagaagtgaataaacaaactaaagtatacccatatcatgaaatactatgcagcaactcacaaggacgataagacagagataccagtgtcagagaagatacggaacactggaactttccagtaccaactgttacaaccattttgaaaatctgtttgtcagtatctacgaaagctacacttacacatactctgtgtgacctggcaattctattcctagatctagacccattagatgtgcatatgtatttcatcaaaagacctgtacgctgatatcctttgatacgctattcacaacagcaaagcaactggaaaggattcaaatgtctaccaccagtagagtgaataaatacacagtgtcctgtccacatgctagagtgccatgccacagacaaaatcaactgttattcaaaacaacatgggaggatcacagcaacaaaatattttatgaattcatttatgtaaatttcaaaatcaggcaaagctcacctgtggtgttaaaagtcaggacagcagttaccctttggaggtggtggctggggaagggctgtggaaatcctggaacacgaaatgttctgcctctggacctgggccctggaggcacaggtgtgttcacctggggaaaattccacctacacttatattcgtatgctggcctttttgtatgttattctgcataaaaaggttctttaataataatttcaactttggggttcagggggtacaggtacaggtttattacatggccatattgtgtgatgctgaggtttgggctatgatggatcccatcaccccagtagtgagcatgatatctaacaggtggtttttcagcccttgcccctcgctttcccccactcccatctagtaggccccagtgtccactgttcccatctttatggccatgtgtacccaactgcttacaaagtttaaaaataatgataattctctaatttctcatatgaggagatctctaagacatagcagaaggtaggaaaagaaaataagtctcacaaacacaaacatgggtctctgttttctgagcaagtttgtgtgtgtgtgattgtatgtgggcacccagtgaaataatcctggcctggatattagcagctgtcctgcagatggaggaggcagatactgttgtggggaatggcatggagagaggaaggggaggaaacgggtgcccttctgcaccgtctggaatgttcacaagcacaccttcatgaagtgctggaagtgctgtgaattttttttttttttttttttttttgagacgaagttttgctcttgttgcccaggctggagtccagtggtgtgatctcggctcactgcaacctctgcctcccgggttcaagcgattctcctgcctcagcctcccgagtagctgggattaaaggtgcccgccaccatgcctggctaattttttgtatttttagtagagacagggtttcaccatgttagccaggctggtcttaaactcctgacctcaggtgatctgcccgcctcagcctcccaaagtgctgggattacaggcgtgggccaccttgcccagttagtactgtgtcattttgaaagttataaaggaatttttatttgtagcatgcacctcctgtgtgtcaggctctatactgggcaccgtcagcctagaagacacagtgcctggtcccagggagtgggcatttggggctgcatgcctgggagtcagtggagagtgggttctggcactgggggtcagtcacaaaggaacaggggcctcaggtgccagctccacagaatgccaaagggcctgggacagctctccagcctctcacctttgctctcttccgtggcagcattctcagcattctaggtgaaagtgtcacccacagtgacaacaaactatgggaaaacagagacataggcaaactatgtgctgcagtcctaattttgacctcagtgggagcgggaggtgggaggctggaagggtgttgggaaatacccaaagcatccagggggcatagcacccctaaccacaggcagggtcttgtcccccattgtgggaatcagcgggtttcaggtctgtcccttcctttcaggttcaggcttgttgttcgaggccaactgcctcctccactgggcacagttctcagctccccgcatcccctcagaggatccctcctgcggatcacgtcgccagcattcccaggtccctgtggtggactactcggggtaggcgtctgtgtggcaggcaggacaatggagacagatgtgcagtgagacctctctgggccccacccttctgctgtgaagactgaataagataactaccaagagtaagggtagcttattcccttcctgtctcttttttttgcccattcctaagaactgcagaaagttctacaacctcgattttctaattttttattttttttaagagacaaggtcttgttccattgcccacgcaggagtactgtggtgtgatcatggctcacctgcagccttgaactgatcctcgtgcctcagcctcccaagtagctgggactacaggtgcacaccaccacgcctagctgatttttaatattttttttgtagagtcagggtctagctatgttgcccaggctggtcttgaactcctggccttcaactcctcagcccctcaaagcagtgggattacaggcatgaggtgatgcacttggcctgaactttctgcttctaatgcaagtgctctagaaacacacaggcttggagaggacactcaaaataaaccaggataggtacaacccccacccatttcagctgccacttgcttccctggccatccctgccctaatgcgtactcacaggtccagtggttatgctcctaaaacccagctgtgaaatgctcaccctctgcagagagacctgctactggatcagcagacatttcctgagaaagggtcagtgggccaccacctcgggcgcagggatagagctgtatggagctcctgcggcctcctaggtcacctgtcactcctcaggaggtgctcacggacctgtgagatttgtgtctcttggcttcccttgcacccagggaaggccactctagggctgctcatgtgaccaggagcatttcacctcccacaacccagctgatgtgtcacatgaccaagagctttgctgtccccgccatccaaagcccattcttctcacctctgcatccccatagccctgcagaaaccctacagctaggcagtccctttttcccagtgggctgggtaggcaagggggtcccagccctccccatacagagcagagggagggctctgcacaagccagatactcagtcaatttctttgaattaaatcaaacttttaaattaaaagttgaccccatagaagagccgacttcatgcttgttctttttgtttgtttgttttgttccatttccttgagacacttcggcaccaagcagcatttccgtaaagaattaaaagcccagaaccaattgtggatgcacagaagcctcccatctacctgcagcagtactgtctgggaacggtcctggcccattttgtggggccttgcactcctgggggtaccttctgcacatgatcgctgcccagctataaaccagcccgagaaggagcgagagccgtccatgggctccatgtcatggatgaagagactgacgcttagagagacagagaataggggatgaggacacagaacgaggactggaattgggaaaaaaaagcagccagggcttttactgctggatctcactgcctgtctccagaatacacgtttaaaatgtactacttaagagtgaagaaaccgagagaaggtctcctgattctttaaaagcgtgacacacagctgggcacggtggctcatgcctataatcccagcactctgggaggccgaggtgggtggaccacctgaggttaggagttcgagtccagcctggccaacatggagaaaccctgtctctactaaaggtacgaaaattagccgggcgtggtagcgggcgcctgtagtcccagctactggggaggctaaggcaggagaattgcttgagccccaagggcggaggttgcagtaagccgggatttcaccactgcactccagcctgggtgacagggcgagactccatctcaaaaaaaagtgtgacacacaaccgcatggcgactctctctgaccggaaaggacagtaggctggagtccggccacgccaccttggcaaggtgtgcttggtgagtctgttcatctctcagcctcagtctccccacttgaaaaatgggacaatatcatcacctcccttggagggcacggggagacacaaactatgcaaggtagataaagcaagaaatgtcacacgtgtagcaagggtgcccagaaccctctgctggtcgcaattgtgggatgcgggtgtttttcttcttgatcaagagggaaagtcatttttatttaatctgaaaatacaaatagaagggccgctttctggatgtagcaaagcctgaaagtccatgaacaccctgtgacaaggttatggggtgcaggggagaagtcgggccctgggtcagcatcccttgaccatcatggattaatctgcctgtgctccaaaggtccccgtgtccacacatagcaagggggctcaaacgctgccttacagctgtaagactcctactgtgcaaagttctcaggaccaaaaagaaaaattacttcgggggtctctcactgactgggtccgggacccaagtctctgaggctcagggcagccctctctgttggcagcctcttggaggggacagtaggaacactgtatcatcgccactgtgaacacagaatgtcacatgagcaaagacacttgtcaaatgcctttcctttacacgcaccctcaccatgacctgtgttaatgaagttaattgaatttaagatcaataatggttaattattgcaatttgacattcagagataaatggctttaagacagagaagtatgtgtgtatgtgtgagcacgcgagagagtgtgtgtgtgtgtgtgaattctctccaaagaaggtgaatgcattacaagcctaagagggatcccacaagccttccattgattctggtacattgtgatcgacttcatcctctgataaatgtgggcttttcagagctacaggtaaatgttctacgagactactctaacccttgtcactggccaaatctatacgtgctgtacaccagaaatctattgagatagattaaagaactgctgtagaaacaagagcagcttcaataaaggtgaaggtttattatattgactattaatgtaacttaactgtatgcagttatgaatgcttatagatcagggcagtttaatttggggcagttggatatgattataattgaacacaaattttttttatatcaccatagatgaactcaattcaatgtggacaaaaagaaaaaaccaacctagcttggaaagtagctaggttataaccaaagggtgaattcctagggagggatggccccaggagagctggcccaggtccaggcctctctaacgatgcactcgccgcaccacctcctgctccaggtcccacagcgtgcatggagctgacgccccagcagtctacagtggccccacaagcctggggtcagggctgctaagtggctcctctgatttgatccaaattggtaagaagtttaattttcaggagagattctcggtaggaagtcacagccccaaatgcattaataatgacactcctccatccacccagaaccagctagatgaccacttacaagattgataatgacaaagtaaatgttgtcaggaagaaagtcctactgattgcggagcactgacaataccgtgcgcctgaggagttctgtcaaaatgtaagattatgcaaaaacaccgttgagaacactgctaatcatctgcttgtgtcaattacttgaagggtctctgacagcatatttacattaaacacatttcaggagcaaaatccttaatgctatatcagaatatttttcattaccattagcaaatctttaaaaatcgttttttcccccctcggctacaataggagtgatggtgagacagggaaggctgggtgggggcctatgtgggtggagtggattgcgggggatttcagttcatccctctgcaaagaagcgggtggtgcagactcagagatggggcatccccaccacgtctccctctcagggcagatgacagggccctctctcatcccaaacaccttccaagcccagtgaacagcagcattggttttcttcctgttggtgtagccagccccacacatctaatgccaggctatttaacagagcaaatgacaggtgtacagaggcaattattgaaattaaaacttagatgacatctgctggggctgtgcactcaaacacctcgccctggtcacgccgtcttgtccacaattatggcaacatggacataaccaaaataaacagcccagggcctgcagtggctgggctgcctgagacatgcctgcgggaaggcactggccctgtgctgggcatcgtcatagagcaggagacaccccggcaaagggattccgcaaggtccaccctcaggcctcccatggcaggtcagagagggtcgggtcagaaggtgtctgaggtgcttggaaaaatacatccggatttttccggacatgtttgccagacatgacaatcatacttaccatggtgatgatggcagccagcatgcttcgatttttaaaatgtttgagcactctgctgtacgttttacctatgctgcctttggtaaggcacaccaaaggcccctcatacccaccccatgaggtccacaggtggagacactgtgtcccagatacacgtctgatgaagtggaaaaccggcatttgaactcaggtccctaggcgcctgttacattccacaccctggacatcttagttctaatgcttgtgagctggccctccaagatcccagcccagtcagcacctgaagacattccttacactcagaaacgcaggcaaaggggcccttacataaagtttgtaaagccccagcaccaccttaatgtggcaaaagagagagccatggtgctgagccatctgagactgccactcacagggcctctccaggtctagggtgcacaggagtgacccctcagtgcatgagctgctgccaacacttcccaagggctcagaggcccggagctgaccctccgcccttgtgatccgtgccctggaaacatagagccacagactctgcccatgtccaggaagaaagacagcacggtgtgtgaatgggacataagactccacatcatctccaacctactcaataagaaatgcaccatacatgcaaaatcagaaagtactcacacctgttcataagtggccagcccaaggaatccagtacttgtggtcattttagaaatctgtgtaagttacatgaaaatttaaagcaaaatgcatttcttttaagaaattctatattctgaaagttttgttttctaaaatctgtctcttgccattccaaacatacagacatttcctcaactgacctttataagtgtgcttttacttttaccttaaaatacttaaaaactacacacatacaaaaatagatatgtctatatataaacacacacatatatatgcatttttcctatcagagtgtgtaggttaaaaaataatgcaaagatgccacattcatcctcaaattgcacttccatatgggaagtgagatgtatactgaggagaccacagttcaaaacaggagcatctggaagccaaagggtctagctcaataaggccaaaatttagggtggattcagcatggcccattgcttgcttggtggaaataagatgtcacaggtaaacaacgtggcttgagttcatctttagttttaatctagattacatgtacatgtatgtgtaaacatatacacatccttatgcttatccataaatgcataaacacacgcccatccacatatgcacaaatggacctctgaatgaatctgatagccctacagagtcatctttcaaatacgtttgaacaaacaactccaaacaaagctacaccaaatgaatgaatatactgggcaaaggtggcccaggctaatgggtggggttgacaacatcagattcctaacagccaagccttcactccggcaaatcgccccccatctctctgggaagagactgaagatggtggagctgctgacccgcaggcctgagtgttgtaaagggacctttctccactacgctaaggaatacgcccgggtctgcactgcgacattggtcgtgctgcaacacaggacagagacggcagcctctgagatggcatagacctggctcaccggagacgcacttggtccacataggcacccacagtcaccaaggtggagggctcagctcatgatggcatggaccacttgacctgcacggggcctgcacagggcccatctggcacctgaccatctcggtggggtggctgagtggacggaatcactcaagcatgaggcacagaatcactcaggagtctggtgggtgctggtacaggctctcatgccccgaccccgccccatcttcctctctcctctgttggcatttcttcccagcaaggtgtcaaggcctcacaggccagatttctaaaaccccaaagcccacaagtgacaaagggcactggcaaaaagatggcacccgctggctgcactgtcatgggatgagccatcggctggtgccagcagaagcacatgggtctcagaaagacggatttttttgcaaagattttattttattcaaaataaatgctagctaccatttggtgacatggatcctgactagggccaagtgctattccagggccttcccagcactaacccacacaccctccacaaggacttcatgaagtcctcactcttttttttattttcattttttttttttgagatggagtcttgctctgtcatccagcctggagtgcaatagtgccatcttggctcactgcaacctccgcctcccgggttcaagtgattgttttgcctcagcctcctgagtagctgggattacaggcgcgcaccaccacgcccagctaatttttgtatttttagtagagacggggtttcaccatgttggtcaagctggtctcgaacttctgacctcgtgatctgcctgcctcggcctcccaaagtgttgggattacaggcttgagtcacggcgcccagtccgaagtgctcactcttacaatttgcctttcacagttgaggactctcagaaacttgctcaaggggactgggcaagcagggccaggactgaggcctcactgtatgcctgtggcccccacacccataactcttcctctccacctttctgggggccctgcctctccctctgcatcttcagctgtttagaaaaagaatctcccttccccaaactgtcaaactgggaccataacaacaacaacaacaaaaaattaatcttgagtttttaaaatatcaaaacctgaaaatgtataattaaattaatcatcataaattactttttagcaccgagagttggatttatagtatcatttccaaacctctctgtgagatttaaatattttatagcatatgtgagttagagggaaaagtgtctgagggcttaaatattgctgcagagcagtagactttgacaaaaactatagcacaactgtttctaaggtagtttgtaaaaattatttatttccataccagttaattatgatgggagtctttgttgaatgcacaagcattaaaaaagtgctgatattttatgcatctttaactggagcgcgattccccgcagcgcactggtaactccttgacatttagcattcactcacagcaactgtaataaggggtttgattgcttcctttgcagacgcagtaatttaataactgtgatcagttgcataaatttactatacaaccatcttaagttagccacattaaaattaagcaaaattgtaatctgttgacagattattgctactgaacaattctactaaaagcatttcagattagcaagtgccacgagcatttgtgttttataagcttgtaaaaaaatacggcagcttcctctttccacatccccatctccagccaccccctctcctgccaccccctccacacacacaccacaaatctgactattaggcaatttcatgaaattctgtgctttctgttaaatcacctctgaactgttgatttcgttatttgaaatgtgtgtggtgaattctgctgtctggaaaggaaaaaaaaaaaaagccgcgtgtcagtttcttctttctttcttcccagtaatttcctttatgcaactttacatccattgcctttgaagggacaggaaacctcctagcatggacctcttctgaataaaatgatcagttccccagagcaaaggaaaagcactaatttcataccttagatggagaaaggtaaaaggtgcccggctccctctgagtgagatccctgcagcaggcatccttaattaaggagacaacagagaagccttcttgcttagttgctaaagaaccccttatggagtttgtggatagaaagagaagagggcacaagttccacaggcaggctttacctagagcatggtgataaagagaggaaaacagcgcccctgcccactctgtttagagcaaaatgggacccgcatctcctgcctggtgccctgtgagttgacttttcagagcaatgtttagccaagcaggcaagtcaggaataactgtttctgatacttcccagcaaatatctttaaccatctgtttacacttgccaaatatgcttccaagtttccaattttatcagtatataaaaagaatatctgtttttaaaaaaaatcgtaaatatcttgtgatgcatctttacataattcaagagaaattaaaaaaaaatttcacttgaaagccagcatgatcacagatttgtttaaactttcatttacatagaagtttggggtgggagccacaaaaagggggtaggcgcttttttggaatggtcaaatgtcaaagttgagtgccaggcggggagtgacgcacaggtgtgccctccccacgagacgacggcacacccaccgtgtgcgctcattcccggggtggccttgcatatgcagcctgtcacttcagatggagttgcggggcctctcccagacaggtgacgcggcgggctgggctgcgagcttccttcggagcgaggaccactactgagtgtgacaaattggatgggacttcactaccaaatttcctgccaagaggcctaacagtcaaatgtctatcttcttctcatcaccaagaagtgatgctacgactttgacatagtgtctccgttacttaaagatacagttaatgcaaagtgatcgcaaaacgtgaggtctgtaaaacttttaagagccaagcaaaggcggcttccatcattggctcttttatcttgagagggcacacgtgcacgtgcgtgggtgcgcatgtgcactcatgcatgggcgtgtgtgcgtatgtatgcgtgtgtgtgtatgtgtgtgtgtaaaaccagaattcctaccaggcagcacagaacctgggtctctgccattgccaccattacctgccattttttataacataatacactggagataccctgggctaggtttgtttgcttctaattataactaattatgcttctaaatatgttctttagggttacacgtgtataaaaatggaggtaggaagaaagaaaatgaatcaggattattaaaagaaagagaaacatactaattagttagctagtatactcatttcaatgtttaataatattttttaacattccagcatacgccgcagaattaaaaattaccacagcaccacctgtgcgtcccctgggacatgaagatttagagttctctcctgcagacttggagtcctcctttctaaatatttctttgactatttctttgtattccacctcattccacccccacaaattagaagccaaaaaaaaaaagatagtaaattttgttccccaccaaagccttgtaaataacatctctacaaagcccaacttaattacataactcaagtgcttgaggaaaaaaaaatgcatctattcccataattttggaagctgcctctacccgtttctatatgtgcagactgcactggctgtgtaaaaagccaagtgcccgccctgttctctcagcctgggtaggaaagagtgccattgtaccccttcattttttttttccatctgcttagtgctccccctccccatgttctgggaaggttctgggctttgtgtggcctacgatggggccaactgcatatggctggggagacgggaagatggagcggagctgagagtgtcaagaaatgcaggagtgatgacatgaggcccgaaccaccctctcacctggaaacagccccacctcctccacctgagcagcacgcggcacggggctggtgttccattaggaccccacaaataaaaccgcgtgatgaatggcaaagccaagggtgccccccaagcctcttgggctggctttcctcaaactccacttctgattgtgggtcagtcgtacacaaacaaagccttaacagaaatgttaccgaggaaataatagccatttccaatgataatacacaattttagcactgacgcttggctgatttaggtgttcggccaatgtgtcaagcagcctgccttccttaggcgggcctttaatgggtaactggcaggctctggcagccttatttctgttttagatttggtttgtcattgggtatccattacctgccattcatctttgatctctttggacaggcctgatcaaaagatgtcatttgacctactccacttggcagaaacttgtatgactctcataaaggggccaccccagctataaataaaatgacattattatttttctgtcctatcatgtagaagagacaattatgataatgcagtgtctgtcatcgggagcccagcaaattgctagctctcacgcaactgtttagctttcttatttgttttttgtctgttttcctccatttcaagttgaaaataaagcagaattgaaatccctaatgttctgcctcccactccaacagtctcggggctgcttcccatggcagtgacgtgcaggtgtggccagcagcttgtgtttgtcaatggtaggtggtggctatggctgtgctcgccaggcatgaacaatgggatcaagtttgtccttcatttaatgtttggaaaacaagctaatctctgaaattagaactgagagatattactgcaaatagataaaaatcatggcaagggtttattgtgtccttaatcaagtcataataagggaaaatgcgctggaacattcccccgacaggcaaaatagagacagctccggtgtcatcgccagggagcccacagcttggggacacaagggtccaattgtttgtcatcgtctccagcgtggaccaccactaagggctccatttctaggagactggctctcgatcctttttggaaatggaggtttcggagctctggggtttgcttccttcccaggtgttttaggctccacaggtacacaggggtagtgtgaagagactagggcagcacgttctccacccaccacgtgctgagaacctccacccaattgatgctcttgtctggaaagagagaaaaacagggacacaccgtctaagacccctgctgaaatcctggctgtgtctgctcagattcagatcatcctagagataaggaagtgactcctacagatgggcttcatttgaaatgagagaaaatgaggccccaaacagaggaaaggactgaccagaggcaccacgaggcgttcataacagagctgagaccagattccacgccgcctaactttttggtggggcccactcgccatgacaggccaccagcctgccgtcctccccaaggccggcccaggagctcagtcttctgtgagccagtgaccaccgtgctgttggcccccagggcctgcctacaatgcccagctgcctctgcaacatgggctgccttgagctttgcttggtgtgaagatgcacaccgtggtgttgcccgccaccccttgcagacacaatgccggaaggcatcgctttgtacggggccctgggttcaggacttgggggtccctatggtctctcagtgctgccatttacccacaggatatgggctaacccaccagggtgcgtgatgtaagagggtaggtggtaaaaggacagaaggatgaaagagagagagggagtagattcggaattccttgcctgaaggaggaacatggcctctagcaggcgtagatgggtggagccatatcttctgcaaaaaaaaaaggacaaaatactctacaggcgcaggaacccaagccagggcaagtcaatccccgcatggaatggagacatcagcattgaggctctctcagtataacatatgacactcatttgaggaagaacacattctcggcattgggaaccatcaagtcagcaagaacaaatattccagattagcacaggggtcaagaaaggcctggaaacaggccccgaactaagaaaccaaggtaggtaaatgaaacgtgcggataaagcatggtactttagtcatccaaacttgcaaagcattaaataatgtggcgcaaagaggaatgacggctcctaagactgttgcaggaatattattccctgaagactcagctggggcatctccactttcaggaagctgtcgccagctttctttcaccccctgggatggccacggcatccctctccatgttcccatcctgctcacggtcatttccatcatggtacccacgtcagaattacgtgcatctgagtctcatcctccacactccaacccccttgaggactgcctgtcttggtgtccctggcacctgccagcactggcttgagcaggtgcttaataaacatctgctcaaattgtttcaacacatactccagtagcctggtgccctcggaggaatttgtgatgatgggaaaatgcatgcaagtatgttttccttccttgagtttgagcgacatctccttcccatccctggaactgtggggcccattcattatgttgtcatgttgccccatctgctaagcctccactcggtgtctcaaccttctcatgtctcttccctactctggtcccaggtaatgagcctctttcctccaagctgcctctcaatggaccagaagtgaagatgaagagtcgagtgacccaaagcaaagagtgtggggcagattagaggagaaaaaccacagtcttccttcatcttcctaggaagatgtgagggtttgggggccattccacatgcatttccttttctttttggtgcagcaccgatcctgtgcactggtgtccagggtggtctgcaagtatctgctgcatggatgaatggatgaactcagggacccactgctcaggagagaatcccttccaccttcttaaaggagatgcagttccaccaatctatgacaagctggaggccacattcctccttcaggcacagaattcagaatgaatgcagggaaaggggtgggcagagtgcgggctctgtgtgatgcataagtcacaatgtgaaaggacactaggacctcacaggcctaggtccatcttctgttctgtcctgagccacagcaggacttgagcaagctacaaaacctctctacgtttctggttcttccctttaaaatgagaatgaaagtcctctcttttaagaattgttgttaatggaattatgcacataaagcacttagcaccatgcctggcatgtggcaagcattcagtaaagaacagttattttggggttacagaaattagaattttccatcagcaaggaagattcctgcagtgacaaggccaggatctctagggcgacatttcagcccctcactgggccccacccttgcagctggaaggatcatgcaatgtccaggaaactcctgcctgtgccatcagctcagcctcttgagaccaggaagggaggtggtgccacctggtaaggtggcagccaaaaggctttcagccacccaaaattctctctccgtctcaggccaagggtttcaccagtagcaagtcagacagactctgggctaagcactgccctgttttagatactcttataaaaagcagataaacttcaagcaagttgggatggaggggtctgaaggctgaagggggttattaatccacctaacactttggttgtggatttattcatcagcacttcccctatagcccactcacccccaacaaatcctaggacagatcaagagcattcgtgtctggggaggcaggagaagctgggaaagagagaaacaaaataggtgccaatgtgctgctgagctctggcctgcctcctgtcacaggaccttcttggggtgagtctcgcctgtggcctccgactgcacagggtttgttccttatgggaaggagacgtcttggtcctacggagtcctccagtacatgcagagatgaagcagaggacagaaggtgctgcactgtgaagggaacttgcccctctgcccagctcacgggctccatactgatcaatgctcagggggcatgggtggaacatgaggactggaagatgagaatcccgtttagggtccattcactgttagggtgagagatctttgagcagagccacccctctttatttgtttgtttatttttgagagagtctctctctgttgcccaggctggagtgcagtggcactatctcagctcactgcagcctccacctcccgggttcaagggactctcctgtctcagcctcctgagtagctgggactgcaggtgtgcgccaccacgcctggcaaatttttgtatttttagtagagatggggtttcaccatattggtcaggctggtctcgaactcctgacctccagtgatccgcccgcctcaacctcccaaagtgctcggattacaggtgtgagccactgcacccggccaagccactcctctttaaatcctggcttctccatgtcatggcctttgagtctcagtttccccatctgtaaaacaggcatggtgacaccaatgtttcccagggttgctaggagaggagcactggacaaaaagagtgttttgcaggctgctctgtgctgtgcacaccactgctgagaagaggcccatcttccctcccacggctggaaactatgaatcagcagatgctggcttaggtcagagaaataagcacagaaccacaaaagaaggatctagagctatgctgtccatggggctaatgactgtgttgtccatggggctatatatgtttaagttaattaaaattaaacaaaatgtaaagttcagatcctccattgcactcatcacacttccgatggggtagtcctatcggacagctcagggcagcaaattcccatcagagcaggacactccattgctggctggaggggacttctcctgttgcttcctgaaccccttggcttcctaatgtcctctctcttcctctttagaaaagacactttcctacagaaacagttattaacccttttggggctttcagggcccctttgggaagttaatcgaagtcagtgttcgctgaaatccagaatctttcagagtgtgggaggagttccaccggtggtacaagaaaatatgaggtggttcatcttgaatcacacggtaataaattactcccttgtcagttccatctttttccctctgattgcttcaaggagaaagtatccggtgggtgctattggtctttaacacctccccaacacttgctaatccccctttttaaagaagagagataaggcattagactccggtaggaaggcaagagaattcagctaggatttaatgacattgtttgatttcacggcgtttatttttatggttattttccctttatggcaagtgattctgggtcttcatttataggagtgacacactttccttttaaaaataaatttatttgagttaaaacgtgtgtaaacagtaagttcaggcagtgcatgtggtatgcagaaacgtcaaacagcatgacaggtttgggactcaggatgccaaacctgcttgggggcaaggaacagtcacagaggcttccagaggagactctgcgggaagccccaggtgagggctttgctctgctaccagcgtttgctgttagcatttccacacccgagatttggaagggaatttgtcaggtttctattaaaacctctgaatgtccagttggaggaggtagtggttattaaacctcaatgttcataaatatgctaataaaaatgtaaaatttgcagtgagccattatcaatcacagacaggatgctccacctttgaacgatggcccccatgcctggctgctgaccgggagctggaagccaagtgtgcaccgctggagggcagcgaggagtctgagctacatgcctgccacgtgcggatgtgggcacctggcagggactagggtggccacgctcctggcactgcgtaccacctgcctgttgggctgcggaaatggttcctgtccccacacatatgccagtgcctctgtgagggtgaggcccatccacctctcccagacacccaggaaacaggcagcgacatgtgacatgtgaattcaccctgagtttggacagattggtgagagtcccctgaacaacgaaatgcatggccgtagccattcagcaaacgagaaggatcctgggacttgaaggatccctgctccttgccctagaaaggccccatcggagccaagcctttcatagccatgcactaccagaagtggggtattatcgagaagggtatggcactgagagtccgggtacctgcatcctggcaccgacactcacttaccaggctgcaacctgcagcacacaattggaagtctttgcgccacagaatttcacttgtaaatcaggtaataccttcatctcgggtaatgacggtgagcctttctctctgcctgcttcccaggtccacatttgggaaaggcaggtcagaccccctcgtgcctgcctctcgagtggctgttgggctcaccggatgcaattggaagatgcttggtggatgatgatgacatgatgacacagggttgcctcccttgtcccctagacaaccagaaaggatgcctccttccggcttctaaggccaggactagaggccttctttccctacagtctgcacgagagatgctgaggccaggccccagccatgccagcctcctttgccaagcactgctacatgcaggcaagggtgtttccagagccatgggagagagagcgggcggcagggaggcatggtcggccatcactgcaatcctgagaagccacatgggcagcggccggaaccgtgtctcacctgcacggtggggctctgcctgcacccctgcttctgcacaagtccatcccagctatctggctgctcacctccttctgcccaaccttctcagggccgggtttctgatgcattgtgaatcatttctaatgacaggatttcacatccccttgtgatactacattcttgtgcataacttgtaatttgagtgattgtgaattgttccgagtgccagattcgtattttgcaatagatcagggttttattcatatgtgagtgcataattttgcctcaagatgcgttagattacattaattaactttgtagccagaatgggagaaattaaccgtttggatgaaccttgctctgtaatcaccgtcattctcagaccccttgagtgtccacctccggggctgtctggaagagcaggcagtgaaataaaaagaaggggaaggaatttgggggcacagctccaggggaaggctcagctcatggcccctgggagaagccaggctcctgagacactggaggtgcttacctctatgagaaaggacgacgggtcctatatccctctgtgtgtttcttctaaactctacagatgcgtgctggacagatagagagcatgggatgtaatcccaagcagggaatcctgccaccaggggttgctgcactggacacttctgtcctgggcacagatcaagggaagaaagcaactctgccaagagatgtctatcacctatgctctccccgagcggccagcagaaatgtatgagctacctggaacagatgctgaaaggcgcattatttggaatatgaccaatccaactttcctttcatgatatttattttttgtttctttttcttttctctttccccttctccttcgaggctcacatcagccatccaatttactgacagtattgacctcttatagaggagattcccccagccccgccctgtcccaaagcgtccccggtctgttcatcacttgggactgataagtccatttctcctccaaagggtggagcttggctgggggtactcaggaagctctactcctgggggcggggtgctggatactgccaggtggcaggacacatcatatcagagccaggccaggccgcagcagtggggcccctcctgccctctgccagggagctgggtgtgtgcgccctagacttccctcactcgccacccagcttggatgggcaaagcactaaaaggtaaatatgagaaatacaattggaattatgataaacagaaataaaaaggggctaaaatcagaaaggttttgtgaaaagaaaaacggctggcaataaagctgaaaacagcagtgctccgaggcaatttagactgcaaaacacaaaccattaagtttgtgcattatcttttaatttaatcttgaatgatttataatccatcacgcaaggcttcaaccatatccaattattctctgctgcttgattgacaagaaaggtgatttattaagctaataaaaagtgatgtgagctgagctcatataaaaaataaccagccggacaaagactttaaagagacatcgaccatttttttttcccacagagaagggtttagtcacttttacccattcagcactaatcaagtagcaacttgggagagagtggcaaggtgtaataattactgctatataaaactagacttgcacttcgggtgggtgtgtaaggagaaggaaataaatattaaaacagatagaagaagtctgacgcccctaagagagtccaaaatgcaggaggatctcaaagtcttcagtgatgaaagcagcaccaacaccagcagctttgttttcagggagggaggcaggagttccctgctacttaaaatgcctttcccattttccagggggaaatctgcctaaatctcccaaagcctgtttgtgagaactccattgtgttttctgcagcagtaacactggaatgcttgtatgcatgaattaaaggggaagacggcacctctaaagtcatctcctgtaattgtttacctaatgctgctcggagactctggggaaaaggcaggtttgcaagatgaagtggtgtgtacgaggcctctcctcatacacaacaggatgccactttaatgtccaagatgctggcgtgtttcagtgagcacagcacttcaggactaatgatgcaatcaagcctcttgcaatcaaacagcctgggctggggaaatagtgctatttgcggcagccgctgtgtcgtgtactaaaattttctggaacagagaggaaataagaaagtaaaaaagcaaaattctaaattttcatgggggagaggaggggctgttagggaaggaaatgttcaagtgtctgctttccacctcatggaaaagtgggaaaagcagagagggaaagaatggggagagagagagagaaggagaaacaggcagagagagacagaagccaacccccgccccacctcagctcactgtacgctgtgtcactgaacagtctttctagtcgttttcccgttttatttctcaattatttgagtcacatatgctccggccaaatattctctgcttgcttttattttctactgcaacccatattacctacagtatattaagcaatctataagggcctggcaccttctatcaatttgaagaagatgatgccaatgatttgcagaggaattacaacaaagaaaggaccacgggagttgaaatttagtcgcaggagacttttttccagggacaaaattctcttctccaggatttttttcatccgtcaacaaaatccaacgggtttttctttttaccagcctccctcccctccagctctctgggcatgcccccagccccagccccagccagagccacagctgcctaggagggaagcattaaaacgctgatatgctgtagtttaatgccccagccatctctgggcagctgttccagccgagccatgccagggccagggtgtgacccactgcagccacatcgggacgatggggatgctgaacagtgcaggctcttgatggggcaagatgcaaagagctgggggaccctggctgcaccatacaacccaggacctgccagggattcagaagctccctgtgatgtctcctggtccttatgtcctcaccccaaatttactgccacactgaccctactggccaagcacagcaaggatcacagaaggcctaaggaactccctgctcagactcaagacaaaggaaggaaacaggctgtgtaattaaggtgcaccaagccaggtgtgaggagaacagcagggtctggagagcagggcgcatccccagactggctgcagctgtcccaaacgcctgccccgctgctcccaagaaggggcggcttgtcatcatgcttggctttcattaactttccttccggaaatctgacccggacatccggggtggaaagcatacagaatcaaacttcatttataaacttttccctctgcatctctttcacgcctgggtcccaggtgaccacggagctcctccaggcacctcccacccctggtaaaagggcccagccgtattgactcatttgtgtgtgaacattcggctgcaggactgtaaaagctccctttaccaaaatcaattcaaagattcaaaacaatctattgaagagttttgcagctagcttttaaaccacttataaaagacaacacacaggaaaaattaacccctgtggctctattaggaacagtataataaatatacatttaaaagatctataaacacatatttatctgcaaaatgttcttgcataaaactgttattgaaaaggctttcattttatctttgtgttattgtaattttattgaattgcttattcattctttgatattgtattttaatggtattataaatctgttttatgtctgataggagcctcattgtaaactgatataacagataatatggcaattcaccataaaaattctaaaccaaaaatgcagatcggaacgcaaagaagcactttaattcattctcggtttcttttcattttattttttaattatttttcatgtgctggttgccatctgttgataaaggatggttgtgtgaaactcactgtacaacacaataggaacttttttgtataattctattcataaaaaatgataacagtataaaagcattacacttctctagactgaggatcattagcaagttcattgtataaactgatttaaattagtcacttctggaacaaaatcctttttttgtaaaatatcttattttgggtaatttttagtatcatgaataaaagaacaaaaaaaaccactttctaaaatgtctcctattatttttatccttttattaaaaacaatgaaaaacaattatgataaaagatggtatcaacatgtatagcaattatgtcataagcccaactatggctcagaaacttcgcaggaagttcattcaataaaagtatcttaacttgccatctctaaatgatgagatttccattatcaggaacaaacgatccggtcaccaatactgtggcaaacacctagtcccaagagcagggctttatagcagctctggtgcctcctcatgggctcctcccatggcccagacaatcctaccaccctggtgccatggctaaaagcagctcattaatctcagctctgtctgatcaaggatcctctgagccggagaccagggacctgagaagttgcttttcctgggtgagtacatctgaatataaaaagcaggcgtcaaaactgtctcctgttaaaagccacctagttcattcccctatagagaaaaacaacaggacttaaggaaagtgtggatccccacctcacaacttagcaacactgcagaaacaagcaggctatgaatagcacctgccaagacggctggctcagctgcagataaaaagaagaacgttgtcaacacaaaagccttctattacaaaatagagaaaagtaggttttccttctttaagaattttgcacataaatcattgtttccaataaacattgtaaaggtttcatcagtaattttttttaaaaaaagctactcatatatatgaagatcacttggtgagacacaaacaattaagccacactgaagaagtgaaaatggctgaaaccctaaggtgagcatatccaggtctgcacagcaaaacccagccacaacctgggcttctcccctgagccccagcccaccactgagggagactgatgtctctgcaggactgagaggcaggccctgaggaaacccgggctcacccaccatgagctcatagcccctcaaagcatcaccaggcagaaagtttctactagaacactgaagagggacaaataaccaccatgacaacggtaatcacaaagaaaacaacagtgtaacaccttttgtcgccctcaaaagcacaaacatcactgaaacaagttttctttctacttaagctgctttgaaaaaaaaaggctgctactaggggcaggaaggcaggcttcattagctgaatgacatatatggactcttaagatgcagcccccctgagaaagtagcaatcggcccttccttcctaattctttccaacacacacgcagttgatagaagtgatggagagtttcttgccaaatcatcctaaactaggacgtaaccgctacagcctggctcaaaaaccagagcttagagctgcagatgacctgacgtattagggagctcacaccctgaaacattttctcgggttacatctgatctatacagaaacagatgaaatatacatgtaggttcttaagtataataaccaaacaaatgcctgtgaacaaggacccaacttgagaatgacaacatgaccacggggcttctccaccgctcaggcaggcggtgggtaaatatgaccctggacatgaatgcgtgacccccaagcaatactaggctcgtgtttgcttctgtgctttgtagaaaagacggatcctggacgtagtcctttttgacttgctttatctacccatataatatcactaagatccatccctgctgttgcccgtggctgccgttccttcatttttactgctctaaaatattccattgtgtgaatgttatttatttaaccttaaagaaaatgtctttctgagacgtgacacctggagtgacaggtgtgttctgtgctctgggcccacctgcgagggatgataactgcagttgtcctcgggttgggggccacatgttttatgatgtgtccttctcgggagaagggacatgttcaggatgatctgagtaactgacctctccctggacctaagcctttgaaggttgttgtagttaagacacggtcaggtgcgggtccaagagacagcactaatggccactgcgcctgagtctgcagtgcacccaggctgcagggaggaagtaaccaggaggctgaagtctccttggctcttggtcccttccactaagacatcctggcttcagctgtaggtctgggtgttcctgggagaatatctgtatctctggttgcaggatgtcactgagtcctgcgcagtgttcaattctgagatgactgaaggagaaggaggcagaattcccttccctacgggtcctgctgagatgttagcaggtgtcaggacaggtcatccggcccagagcctcaagatccatcgtccacagaagatctgcttcacatttttaaaatcatagcttggcaactgtcaatacattgtctcccactttgcaatacataaagaatgtaaaactgtgtcctgttgaaggatggcagtgataccatgcaagcaaaatacagtgctttataattttttttccagcatccctttccaccaaggcctggccagctccttaatgtctaagttcatcctctgaacctgatgaatcaatcattccaaggtggaggtgggtaatgacagtgctgagaaggccatggctctcacttaaggctgacatgggagacaggcagggctggacgctgctcactggcccgccaatcggagctctaccttccaacttcacagtgcccctaggacatgcccggtggcgtcatcacatggctcaccactgaagcactccagagaccgttccccgttgtttttaactgcccacctagcaagtgcatttctggttactcttatgaaatctaaacatggagcctacagctctgcctgaaacctcatggaaacacaccaaggtgtctgcatacggcagactcacgccaggttaacgcaaggggcctggccacaatcaggcagcaaggtcaaaagcacctgacactaatgatgtatcctcgtttccccacaacagcaggcccgacgtggacagcagtactttccatccagactgtgtgtgagacagagggagtgagccagagttgaggccaggagagaaagaaggtagtgcttaattgtcgttgattacatatttattaaatatatatttttatatatattatgtatgagtaaacgcatttccttgaagatgttttttctttttctttttttttatactttaagttctggggtacatgtgcagaacgtgcatgtttgttacataggtatacacgtaccatggtggttttctgtacccatcaacccatcacctacattaggtattgctcctaatgctatccttctccattccccctacccccaaaaaggccccggtgtgtgatgttcccctccctgtgtccatatgttctcattgttcaactcccacttatgagtgagaacacgcagtgtttggttttctgttcttgtgttagtttgctaagaataatggttttatgtttgtttgtttttttttgtttttctcagacggagtcttgctctgtcacccaggctggagtgcagtggcacaatcttggcctattgcaatctctatctcctgggttcaaacgattttcgtgcctcggcctcccaagtatctgggattacaggttcccggccaacacacctggcaaatttttgtattttaagtagagacagggtttcaccatgttggctgggttggtctcaaactcctgcctttgcctcccaaagtgctgggattacaggcgtgagcccccgtgcctagccttatgtatgtatttttttttagagactaggtctcactctgacatccaggctgcaatgcagtggtgcaatcatagcttactataggcatgaactcctgggctcaagggattctcccatctcagcctcccaagtagctgaaactacagatgcatgctaccatgcccagctaacttttaatgttttgtagagaccaggtctcactatgttgcccaggctggtctcgaactgctagcctcaagcgatcctcctgcctcggcctcccaaagtgctaggattacaggcatgggccaccatccccagccagtacttactttttgaatggatgaatgagtgaaggaataaattagtgatggacataataaaggaatgagtgaatgaatgaatgaatgagtgacagaacgaatgaatgactgaataaatgaaactaattatttagttaccttcttcccagccacaaagctctctgatacaagataacatcaacatcaaggattagcaatatatgtctattgatgaaaatttggaaaataaaggcatatagaagaaagcagaaaaataaaaacccttacattttggagtgcttattccttttattttccctttataatgtgtgcatgtgtgtgaatgtgttgggttggtattgtatttggcaacctgcttttttcacgcaacattgggtcaagagcatttctctcacatgaaaatgttttaaaccagccttctgctatcaaatgctgagataacctcaaaggagtggaagtccatacagccagacaccaaaggccaggcctccctcttccagccaggagctgcccaactcacccaggagcatgctgccaccgtagatccctgagttccacagagtagcctatgatcatgaacttcactgcatggcattcagcactctttactattcaatggtttgggggcctttaaaaatcagaaagcaaatgctatgatccaatggtgagctcccgtaaataggtttaattgtaaaacatcacatttattccagatgtgaagacacatgagttttgccatttaagtagaaagacaaagcataattctatcaatgcatatttttccttttcttttctttatctttgttgtgggttttgttgttcacctctacacagcttcattgtcaaagaactctaccaagtgggagcactggatttacctctgctctcagtgatgcggctggtttacgaatacccagatgatttcacatttgtagacccaggataaactttaagaaatgtccacatctagaccaggaagaagttggcttcaggtgcagatacatcagggtagacccaccacagtctcccacacagtcaccccatccacaatcaccttcccacactgccacacacctcagaaagatgttttctcccaggtggtaaagacagcagctgctgctcttgtacttgaacctggcctccaacacacacacacacacacacacacacacacacacacacacacacacacacacacagtgcattgcaggataggcagcctagggcatccctttgcatgtggggctaccctcattcaaggcatcaccgagggctcagggatcagaagccacgaggggcatcttcacaaccaaaagcaggaggaaaaaacgtctccgcagcacccaatttgatgctggctctccgcccctacatcaacttgcacagccaagccctcaaggctgtgcacactgggccagcctaccatcagtagagcaggaaaccaagctactagagaggcaaccaaggttgttttgaaagcgttattattatcattatgattttaatgtagtagacttgtgagttttccatcattataaatccagtctgaattttcatttttaacgtttacaatttgactattcagaatgaaatcttaagcagcaaagtttggaacaagatgaatactgccagttgacttacacctcccgcatataaacaattgtgtcaagttaggaaaactaatataatttatgtaaatatcctgatttctttgatatcaacataacacgatgaaggcttcaaattcagacacaagtttccaacactgcagcattgagacagctttccttcaagcaccttccaaacccaaaagaatgggcaaggggcgtgaagcctgaatgggaagtgacttaccactgggttttaggtttggaggcctatggcctctggtatatggaacttccctgaaatctgccccaccagcattctgcaccaactctctgacacaacagtccctctgtctccactaccattgcttctaaaacaagggacaaccccacttagaaaggcaaagtatccttgcattatgtaggccaagtccagaggggaaaaccctttaaaattagagaatctctgggtatagtgattccatggaagcacagtgattttttttttattttttcaattccgtaagtggaaagtgaagaaaccattttcatatgagcatatttttctccaaggaacagttagaaaaatgctgatgtggtgtctcaatacgttttactacaatgccatcaattacataaaaacaaaattaagtcactgtttcaaaatccttaaatattattcagctaaaacccaaaaggacattttcagtattcctcggtcattatctaagaagctccgcgctgtagccagccacctccgctgtgctccgtaggaactaaacataggtagtatacgggcacagtgcctctgtgtcttggccgttgggctctctgagcgacctcaggtaatgaggatgcctatggagagggcttccgcagtccggccacagagccaggctttacaccctcagtgctttcactggtcgggaccggccagggaatgacatgtgaacttaggctggtctcagttttcccgtccatccaatgaggctgtccctgcagatgaatttaaaaggctgtgatcctatgaatttacctatttgctgtcacccagagactgaaataaaaaaggcaaagatgtctgagatgaatacagggattcatatgctttcatatccgtatccatttttgttgatgcatggaggcttctgggtgcctgctgagcgagagaaggggttgctgactgtgatgctgtcctacctaagcgctgacggccagagacatcacgcgcgcactcccacgcagctgtgggaagcgaaatgtgtgtgatctttttggagaacagtttggatatttatcattttgttaacctgaacataccttttcagctagcaattccgcctgtaggactgcatcccacaaggatgtaagtggaaggacattactatacaaaggcgtgtgcagaaggatgttcactatggtactgtttgtcaaagaaaagactagaagcaaccagaatgtccatgcagagggtaactcattcactagagtcaaacgtggcccttaaaaagtataaggcagctctgtgcaacaaaatatggtaggatatagcagctgaaacctaacatgatataagatgatgactgagatacatagatttgccaccattttattatgtacaatgtaatatacacagcaaagtttaaagaattttgcctgtacacccatcacctagtttaaaactttaacattccgctttatttgctttatcacatatatacccatcattccatgtatcttaacttttggatgcatgtcaaagtaaactgcagatatccaaagtatattcttagacaaaaacaggtacaacatggagtgtaaagtgtggatttctcatttaaaatatttaaaatatacttttaatttaatggcaaaactgcaattacttttgcaccaacataaatatctagaagactatactacaaactggtatcggtgcttgcccctagggagaagaactgaggagctggggttagaagaagactctcttttaactgcataccctttgattctcttgaatattgcattatggacatcattttgtttaatttaaagaatgacaatgcatccactttcatgagagaaagctactgtcaaatctttcagggctctaggtagcttctgtagagcagccctgcatgcttagaagcctggcgcgtgtgtgtgcatgtgcacacgtgcctgcgtgtgtctgtgtgtgcatgagcacgcgtacacacccacacccagatgctcggagcctgcacagtgagggtggtgctgacctcccctcatctatcgctgtaagtcactttctcatggggctgaaacctcggagtgtgaagcaaccatcttcaggaggctcattatttaatttccaagtaagcagctgcaaaagacagcatgtttgttgctgttagggagaacggagcacatggaagacaggagggaaaggcagttcctctgctcagggtagctctgcactgcgagtgcccatgtctcagtctcccttactgtaaacatttgtgcaacttcaaataaatatcctccccaagtctcacgcagccttcggctctgatggaaaccctatgtgtgccccagtgtgccagtgtgcacaggccagagaagcatgcaaatacaggggagaagtccagctccatgtgaggaacgccagagaaggcatcctggagagaagtgagcagtccagaatgtagactctccttccttacagcactcagccaggctactgaaaggcagcagctttctgtttcattaaaaaaaaaaccagcagaggagtaaaaagcccttagaaaaaacatagaattaaacatgatcatgagaacagtactgtaagccaaaccttcaaaggaaaaaagaatattccacggcattactggatgtgttcgaccaattcccttcttccctgagacctgtagctcgaggttctagactttgagcctctgggctaccgctgcacatttttgaacagcgatcaatttccttgtgtgttttaaaccctgggaatcatattctacatgtgagagatagtaaaatagattttaaaaattgaggtaactgaatatgtggagttatgtcaacatgtcagaataaatacctgaaatccttacttttctacatatgaaagggatctgatatctaatgagagggaaggaaaatgcactttgttagcattctgctttattcttgaaaacatgcatataaggctagttttaaaaatccctctgataagaataagactgtgagaacactgatttccactaggtgatacacatatgtaccatacatatacatacatatgtaagaatacatatatgtacacacaatacacgtatacacgcatataaatatacagtgtatatgtaactgagccaggcagtatacttaaaggcaataatatgatagtatgaaggcaatttgtatcttaccacatattgaaataaaacaccctgcacagcccctaaacctcaaaatccaatacacaaaatgaaacgaattgcactgggaaaaaaaataaagaaatgagaaaatgaactacgatattctcttatttgtttagtgttctctttctctagagtttacatggacattgtctctagttgcatctgcaaaccaatacatcggctgtcagatcactaaggcatttgacaacatcattctagagcctttagttactgagatatcaataattaaatgcattcagttcacactttgttcttgcagataccagctatttatctctgtcctctgaagaagctaatggtataatgggcaaaacatcaagaataattaagaaaaacgttgctacaaactctgtcagaagaaatataacttttgcccaggcccccagctagaattcatttatacaagatccacccaaaaccaaggcacctttgctgaaaagcgaagtgctaggctcatggagcagggaactcactcactctgtccacctgaggggaagaccagtgggcacttctctgagtgtgagccttgaaaagccttgggtgtgtgcatatagcatcagctataaaacagcggggactgcgggccacgttggcacctctcccacaccagggatgggctctggaaggccagcccaggctgacaaatggcagcaggactgacttgcttcagtggactggcccctgctgatggagcccaaccttcctgcaggccattcacctcccagctgagccatccatgtttcaaagcttgtttgcagcattagctggtaccaaaacagaagttctgagaacatcttattcaaggaatggcgggttaaatcttaacaggtctatttttctttagtagagagtgtctctctcctttcatatccaataacaaataagaagagagaaactgtgaggtgttttcttctttaggtaagggtcaggcctagatggtatataaactccaaacagattatattttaagttggtgacaattaattacaataccgtatacatactgcagataacacaatttaagattaaagaattatctggagccatagtaatgggagatgactttgaagaggcagccttccagataagccatgtcacatatctgcatatcctttcaaacatctttgtcacctaagcgggagtggctcccaatcactgttcaccaatctcacttgcggaagagttggtagtcaacttcctgtacaggggccgtgtgagctcctggatgtctaccttaaacttcaaagagccacatttacagaaaatgaaatgctcacatttcatcattaaattacactaggctcccaatcttcatgcggcacatgtattgcactgaaaacggatatttgttattaatgacaaagatatggaaaatgtgaagttgaaataagctacccaaacttaagagaaagaaatgttacaggaactgctttgtcaaccctaattgtgtaattacttcttggcttggtcacccaagctccgagcaagaaataagagacaatggtaatttcttactactgaaatgaaggtgtcacgctgccttgtgcattctgtgtaagcagggctaaagtttacatttatatcacgttacctccattacaatcatccaggccactgcaagaacttagtggtataaggtcagccctggcaatgggcacgctcaagtttacttgcacaaacatttaatttaggcagagtggaggcatctctgcttttggtcatcatcttacccctcacctcacaccggtgaaattggtgaactgctactggcaacttgcagactcacagcaataaaatagtgtttttaaatggtgctaatacagtggctaccaataaaaatgaaccactagatggctttagatttttcacttctgaatatcggaagatgcattatttatggtgtcaaagctaaacctgggtacagcacttgggagtgggggtgtttgtggagagagaggcaggaacaccgccctgtgtaactccatccctttctctcttcactccacagttccccttatagctcgataattaattacaaggccgcataattctatcttcagtcccatcagcgttgggtcaactaagagcaaggatcacatgccaaaattgttgtgtgttttttttccacaccaagtatgaaccactcctcattctaatggaaaaaagagcgcagacacacaactaggaagagaaaaaaatgaaattccattataactggtttcctcaagctccagcctaggatatgagtaatcataaaaactgtaatatcagcttttttgttttccttaacactgggttcctactttatttcctttcaaagagggtcaagatcctttttttttttttaattcataaaagctgctgtgtgataaccaaaaggttggtttctctctgtaatagctctgccttccgtgatacttttaaatttgggggcaaaaataaaactcgctaaactctcaacagctgccctgagtgaacttgaagcccctcacctgcctggccctcaggccttctggaaacatctaacgcctagcaggggtggagcagtgagctgaccggcaggcatggaccaggagctgctagcacaggcctcgggaggtggcctccgggctgcttggccgtaccttgaggactggcctgacggctcccaatgcccgagctcccatgtgaagtgcagggaggagcaggtcagtggccacagcagcctggcctggcctgggtcacaccctcggtcagcatcgccccaatgtcactctctagttctgttttctcctccctacccactcccaccttaaccagccacagggaatggcggggtgcaaaatggaggctgttgacctgctgtgtgatccacacctccctctgggctcaaaacatcaatgtgcttttaacaaggagccaagtgctgtttaatccttgggcggggggaggaaagtccagaacacctatgggtcatgaagcagcccacgctgagaaggcgaccccagaccccagacggaggtgtcaggagcttgttttcccagcacttcctgttggcagggtcacagctctaccgagagaaggtgggccgtaccccagggcacaggaatcagcattgacatgcccaaaaactgacatgcatgcttgtcccccacaggcacgggcatgtccccagtcaccatggtggcagaaggacaatgggaaacgcagggcctgccaggcaaattctagcaaagacgggcttcctaaaatctcccttctacatgagagctgcccaacccaacggcagagttatgactcaccgaaagggataccccctccttccctctaaggactgaaggagggaaacggcgcatgtaaccctggcctaagagagacccccgggctgaaccaaagcatcagagattcagagggcacgcggggaatgtggacagagcgacaccaggccttcctgagctcacctgtaccagagcctcaggaaacatgtctgtaaaaccgctctcatagtaagcactttattatctacttttggcgcagtgatgagttaaaggggcattaattttctttcatagcctggaatagcttatttatcattttttttgtctttgtcactgatatttcagatctgctgcgaattgctgtttttttgttttgttctgttttgttactgttgtttaattaatctgcactcatacaaccaccaaaacaatcacggtcctactggtaccagcagatgtggccgaaatgtgccctgaaacttcccaactgcagctcgaccctgcttgcagtgctgtgtcataacgaagggaagtcaactcaagatgcattttctggaaatgccatggacgcacagagagaagaaactacaaatagtgttgcaaggaaggaggccagcggctgcattcactgtgtcactgcggccaaggtttctgggtaccttatgttcaccacctgccacctactgtggtgtcagagctgtctggtccagccgggacagtcaattgattttcacagaacgtccattttatgtttccacaccagagcacgctgcaccttcgtaaggaggggtggctgcttctaagggcagagcggctgggccccagccaagcctgcctccctgactgcagaagatgtcacctcccccgggcactttcttctgggcaggggcaaggaggaggaagggagaggaggtacgtgaagaagatgtcccccataaaaccaagggtgttcccttctcaacctctcccttttccccctctaactgagtctccaaaaaatgcatgtttccattcacaaaaagtatgcagaatcactgatgggagcaaaagaagaccctttttcctattacaggcaaaacctaggctgattctcttgcttccttcagctgtcaatgaggtggtgtgttcccggcctcctgacaatataatcatcataaactttattattacatctggaatttcatgatatgtttagtaattgattacagagacacaacccagaatgcggctcccactcgctctgccacgattccagtaacctaactgcttaatacccctggaatgtataaacagtgttaactgctgcattccccacactgccatggcagaagggaaccacggagctggtggggctctgaaagctcaaggccattttcacttactgaatataatgtcatgggatagaaactgagatcacattttttggagccacgatgaccgacgacccctcatcagatgtgattggggcacaaatccactaaaattatcagctgtattggggaacggagatgtgccatgaagtttgcacagggccatcacccatccctacttagtctcagtttggtggggactccagtttaggggactgtgattactggggttcttcaaaaaagctgcacaactcgctatttctaattttatgaacaccgtgatatgaatgcaatgcaaagcagagaaaaagccatattgggtcaggcctgcaattacagtggctagtgcacttactatctcataggaataaaggcaaaaaacaaaaacaaaacaaaacaaaacaggggtaggccaggcacatggctcacacctgtaatcccagcacttttggagaccgaggagggtagactgcttgagcccaggagttcgagaccagcctaggcaacatggcaaaaccccatcctacaaaaaatagaaaaattactcaggcatgatggtgtgtgcctgtggtcccagctactcaggaggctgaggtgggaggactgtctgagcccaaggaggtcgaggctgcagtgagccatgatcatgccactgcactccagcctgggtgacaagggagatcctgtctcacaataaataaataaataaataaataaataaataaataaataaataaatccaggggtgaaggccacactcaaagtgtctgggagttggggcctcagagagatctacatgaacagggcatttgttccctcccactcccaccaagggagggcgaagagcaatgcagctgccctccctaacactactccaactcaggaggttatgaccaaggacatgcgagcccctctctgggtgaaaatcagctccattccccctgcagaaacgctcccactcagctcttgtgcctacactctccctcctgtaacaagtcaatttacaaaaaccagacccatctcagcaaggggacctggatcggcccttttcacccgcatatcatcttgaacccaaacagtcccttgaaccagcaaatcctcagccaaccccgtggcatgcagagtgtgttatctctccaggcagatccactttataaaccaccaaagaagccccatggaaggttctgcttgcaacaaaaaaaacaaacatgctgatgtcactccaacctgagctcttgggccccagtgatggggcccgggggactttacagtgggatgcttgtcccagagctgcctctccaggccaagtgagccatcatcctgggaccacctggaccagccaggcccccatgaaacttggccagcgcgttcccgttaaaaatggtcctgccattcacctcagccaggttcccgcacgcacgctaataagtacttgtttgttgaactgaaaaatcattaccacagaacacgtcaagtaatgaaagatgttttccttgcagaaatgttaaatactccacttctttcacaaggagcgtgtacgtgtgtttccaaataataccttgctccctccccacccacactacatcagaaagtatggagctccaagacccaatttgaacagggctcatgttgcacggctctaagaaccaagaacatgctgttattttatttattttcctttgcccagctgactacgtgtttgttctattagttattcacctaaccatctcggtaggaacctccgtcactgtcacgtaggggagggtccactctgccttatgattttatacagaaaagcaagagaaaataacaccaccgcagcctcatctattacacacccatagtatttgctaactaatatatgtgaaagagccattttactacaacctcagagcagaaacaaaggcaagaaatggaatgggaacatttcaccacatgaaaaccactgataacccatcttctcctctggcaaatatgaatctctgccccctttcaaaagctttttgttaggcagatgagtaataacaattgcgtcttatgcaatgcactgaggtcttttaagtgttttggaatgtctctacctacagggagtcacactggttaatttctgctgcctttccctctcatcctaaggcttcaggcaaagccagcagggtgggggctgagcctgctttgagtctatggcagctgagttaggaaaaaccaaaatgacttccaggtaaccttgtctcatggaactccaggaggcaaatacacatcacttagatagaacactcaaatatcaagttgatgcgggggtcagtggagtcttaggttttctcaccataacatatggctttgaatgtggtggctctatcctgccatgcccccttgagacataagagacctatgtttatgcctggctcccatgtcagagaatccataacctggggacggagatgctgaaatcctggccaaaatgcacacccacagaagccaaatctcctctaaagaataagcaatcatcatcccttcttcctgccctctctctgtcatgtgttcagtgagtcactcaaaaagctgccaggggttacctgggggagcaagaaacacaagatcctgaccagggctccaggaaaaatgacctgcgtgaacttctcaaaacttaaagactttccctcttcttcacccattgcttgttttcccatttttaagagggagcaaatctcactctaattttactagcattaaaggttgacattttttatatgtgaattcacaaatctaccataaatgattcacgggatctttcttcctttgcccttccccgacgaaccgccacattttggaactgcgttggctgacattaagcaaagcgctttctcagcaattatttggaaaggagagatggcaactacaagaatttctctctgaggaacagaggagctaccctcacggcccacttccaaatggccaggtctcacggaagacaggagggcctcctcccctgcccggacactgccatccacctgaagctctcaagccctggtcaggcatctactggaatctctggcattcctgcagcacaccccgttgttggtctagaacaggtactgactgccctggaaaatactgaccttaaggaccactgctgtgtgttcagaaaactcaagagactggttgtctcccactcagacttgtgagcttagaaggccaccaaggagattccggctcaagaacccaaatcgtcacctgaagtcgaagccactcatttccctaaaggccaagttctgataaggaacacttgccccagcctcctgaacaggtgagacctctgtgagggtaccagcaggcctggcaggtgcttttgcttatctgggtctctctctacatatatttctctatccccaaaaggccagagctgtgtcacccccgtgggctccaagtgcattcattacagaaggtggacgtcacaccatgaggtgcagccacctgagattcctctgggactcttggcaaaaaatccccggtgctgtgacagggagggagtcagggacggagtccctagtgcactgatctggcgttccctgaaaacggtgtcccagctcaaaaatgtgttgctttcttccttttcatgaattctaatattcaagccttttttcctcctgctaattttagaagtcctgctattctttgggaagagaatggtgtgaaaatcaagcatagtatccaaaaataaaagagtagatctgtttcagggtttgcagcatatttcactgaaaagcaactccagatatgccactttctatctagtttttaatacattttccaattcctccagaatattttagcttcagaaaaagcaagaacgaacttcctgaactatgacaattttttttgaggctgaaaggggcacccagaatggtctttaaaccatgactgggggccttttcagaatgtgacgccaggttatcgctctctggctgggactctgtagtgcactttgtgggaccacacggagacagattcgaagtaggatggatggattctctaggtccttgagcatgttccagttaggcaagaggccagaggagatgcatagcttactctgagcatcttgacggtggacctcatggaatgtctttcaagcttcccatcttcatgttttaaaaaatccggttatctaaggaacgaagtttcagacccaccagaactgtagaagggcatcggatcctggtcagcagggtctcactccagttcttcggggtctgagactctctggaagagccaagaatgtgggctggggagtggagggaacagatgcggggcaccagtggatacctgaagaccccagcctgtgcctcctcaccagccaggaaagccagagatttttaacaaaaagttagaactttgtgtcaagcccttcaagcaaacaataaatattacttctgttcataatcagacttctctccagcatcgtctttgaatgttgaacctttttcaattaattaaaaactatgcactgcagagtgcatattttatcagccctcagctgcttaagtgtctagaaaagaccaggcagtttttctttctttcttcctttctttttctttttttctattttttttttttttttttacaggcaacccagagcaagtacttgcaagggtcatatctttttaattatcttttctctctttgattaattattccgtctgacaatagcgtgtttctaatgctattcacctgcctttgatgattgacaacttttctgtctgattcagagcaaacagctgctgccacaatctcctagcaacccgggtgtgatggatgagcccccaagatggatggctgcaataaatcatgtctccagccataaaactgagaaaaggggataagaagaaaagcgaacaaaaaacaaaacaaggtttcttcccatgagtgcactcagttccttaccaattatacctgaaatggactttgcacctattaatagcaaagtttttctaatcagtaaaaatgggatgatggcatttgtatcaaaggtgtttacaattgttcctgcaaattggcacttgtactccaatcaccttcaacactgcccaagtgcaagggcagatgatcaaagttttgccttcttccacgaagtctcagcaaggaacaacatcacctttgtaccactggctacaattccaggcaccaacaaagaataccaatctgattctacccaatttttggcagcagctggacaacaccaaaagtaaattctaagtcatgctgaatgcagtgcaaagtgttaggctgcgaataaagttatttcaaaataaacacacacacacacacacacacacacacacacaaagttgcctggagttgatgagtgaatcagtaccatttccatttctttcctgttcatggcagttgcaggcgttttacatgtcagggaaaagtttgtcccagaagcagcaagataggaacattcagccctttcacaaattctagattctcatttctttaggtagaaaaactcttccgttctaactttctatcccatcattcttaaaaattaatgtccacactgtaagtcatacaacaagcctttgatttcattagcaaccccaaataaagtcacatatttaatagaatccctgccaattaaatttgcactatcggggctctcccagtagtgtagatccagcaggaaggcctagagtttctgctttcctttttccaccagggaagcaggctgcaaggcctcttgcagcagaagaggtggaaaggccagagcttcaccgactcctcaggcagctgggggctgtgtcagtgaaccaggctgcgtccctgagtacttccagtaggtgggggtgtcctggtgcacacagctcaagggtgcaaacccagaagcgattaactggcagggcttgggaacagctgtccacatcaggcctggtgggggtctgctggggccctgcagaggggacagagctcagacacaaaggggaagaggctgctgggagcccgggcagggagccgcaaaagattattttttatctgaaatattcctgagacgtggaagtctttacgtttcttcattctcacactactaaccaagccaaccaaaagatttttttaatagttatattgtgctaagcttttcagatacggtgttggtttttcttttttttttcttttttttttttttttagcatgacacggagtttaaaaaaaatcagacaagggttctggcttcagcaactgcagctctgtttatattttaatgttttgtacgtgactgcttctgtgggggaagaaaaagagggagagagaaagttgcctgtgagctttagtgtaaatcacagatacttcatttttctctgtgtccttggaaattattcaaaattaaagccttcctccctccatcttttttttctttctttctttctttcttttttcttttttttccagtgggggagtcttctgtattgcacatgcgagggtttgtgtctggtcagctgcaatgagaaggcaaggccaatcgatagaaacacacacacaggcccctaccctgccccagcttgtccgactctcaagttacaggtttacacggcaagtctaaataatattcaaaatgataaatggtacccgaagcccggcatccaccatcaatctttttttaaggaacatccatcttcaataacgcacgtttgaatcatgtgaagtcaggagccctgagattcatttctaccaccctttgcaagccagggtggcttgaatgatacctgtcaacctttttcttttttcttttttttttctctccccttgactaatggggaaaaaaaaaggcagggaaaagagaaaaggaatgagaaaggggggaaaaaaagtcagaagagtgtcaaaggctgaacagtgtggtttagcagataatatgaatgagcataacctctcccgtgcctctgccaatctcccacccgccacgccacgcacccagccatccagaagcaggctctacccccttctcccctgcccagcctctttcctccctttccctcttgccaaatcagcagagctccctcctgcaagccacagggtacagtaccaagaggaggaagagacagcctcacatggacctgggcttccctcccctccccgtagtctggctggggcccatatgataaatgacatatgtcattctgtcaggagggaagggtgggtcagtgatgtatgactctgctgaaaaggaaatcgactgtttggcatggtgcagctcttctccaccaggatttagtttcagaactctgaaatgaattctccgacgtttcaagtgcatacttagggcagggtgatgggaggcctgggaaatcgtactccatcctcccactgcccttcccatggcaaaaaggaaaaaaaaaaggggggggcgttctgctgctgatacctgcaaaaggccacgcacgtgtcgaagtccctagctgtcgcaacaccgtgggttatttaaaaaaattgactttaaaaaaaaaaaaagaaagaaaagaaatcaagtggagtcaggttagcccttttatttatttattttttaatggcaaagggctgacacaaaagcaagataaaaattagcatgtttgaagtaatcgtcccgcagcttgacatctgcatagtaaattttaaaggaaaaaaatgtgtcagacagccatgagccgcctcgccctccccctttcattagctcactgccagggtggcactgctgaacctcattatggcgagaggatttatgaagctgaacccaatggcaaagaaaaggcatctgtcaataattgtagggagctgcactcacagctttgaaatctcattaagtatgcagttatcaggcataaagatcaaaaacattactcaactccgacagaatcttatggaggaacattaattagcaacaggcctacagtacaaaaaaaaaaaaaaaaaaaaaaaaaaccacagacttcctctcacacctgcccaacccacaaacctaaagcaacactccccctcccgcctgaaaaaaaataattcccagcatctgaaactgatcaagaacatgaaacaagagagacgcacacagaaaaggggaaagggagggaaggggtgggcggcgggcagggaggaggggagagggagggcggggaaattcagttgagaaagccttggcggtgaggagagaaaaggaagaagctgtcaaacttgagaaggatgtcagtgcgggccctgattactggggcctatggagttctcagaccttttatcatcatcaccatcaaaaccagtctaggagtcactaccgggaggactgggggctgcaggtttgcagcccaggcccagggcccagaccccaggaccctctcctccagcccctgcttacctggcaggcaggaggctgcagggccaagacccaggaggcaggccccgctttccccagccagtctgcacccagccagctaaagctggcagcaagacctgccttcacaggctctggacacaggccagggaaccactgcgttcaccttccatctctcaaccactgtaacacacctttttcttcctccaaagagactgcagcatccccttctcacacaggcaccttctgttatttgatttctgtgtgcaatcccttactgaaaaatacaatatagatgggggaaggcacgtggaaactgccaagctgaccctgagtcccgaggcctccagacctctgtaacacttgggacaaggtgcagctcattacgggtgtccagcagatccacacactagtttgactctaggatctccaggaaggtaaaattaaatggcaagtttcctaccccaccacattctagcctcttgcaagatgcattggcaaagagtaatgtacataatgtacatgtgtttcagaagcatcccacaagtattgcgcacttggggtctcaggcaaacttccctgatgtcctgtggtggtctggatccagggtaggtgcacagaggcctgatggggtgggagtgtgtctcaaataccacacaggtttcagtccaacaggcaacatcagccactcccggacatgtcatgcaacagtgaggcaccatctgtagcccccacccccatgaaaggtgtaggaaaataataaagtagatatcctgcatgttatttcccttattgcactgttatagaaaggtggccttctctgttcacctgctagcatgcactcactctctctctctctctctctgacacacacacacacacacacacacacacacacacacacacagcacttcccacagtcccacaccataagaaaacctacagaacagctcctttgatccgaatcctctgctagcattctcctggctcctcactcactcctaggccacattcttccctggttccacggctacttctgaagtgtttacctctctggtctactcagaagacaatggtcaccttttcataattagccacatctttaagaaaacgggcattaagattcctaggcaaccagcttggagatccctccaaaccaaggcccatcttttccaataaatgcctctcctttagaatatcaatgaacacagctcgaataaactgtcacctatgaccaaaaataggaacacttgtctataaaccagacttgatgagaaggcattttagcaggagtattacaataaggtgtttacattttttatgtacttaccatattacctttattatgtgtaacatcaaagtgattatagcaattacatctaacagaattaattacagaacttcgtatcattccaggatacataatgcattagaggtaagccaaagaaagaaaacatcttgattgtggtaactattgttggggtgtattttctctagcagcaatgccacaccaacggcagctttctgagcaatggaaactgaggggtttaacagggaaaaagctgtattctcttaaaattgaactcatgctttttgcttaatagtacgttggtgatagtggacatataaaatcaatttaattttttaagtgtaaatctttaaaaggtgctggttaatccacccaaccaatgttaatacataaaggagaaagcacatgggtgaaagacttacaagtctttacgtatgcaaaataaattcactcaaggcttcattaatattaatttaaattcaaaacccatttacattaaattgttcattaaaaattgcctattttatgcaacatgcatttctcaaagaactcagaggaaactgaatacataggactagatttaatgatgggaatggaaaatcaaaagtaaatgaattggagtcatttcacgtatattaccaaacagccctttgctctccattaaggatgggttccactttgggaaacaaatatattttctgaatattgtgttttccattgctataaacttgtaaacatgaccttctggcctaccacagaggaaaaagaagaaacacagagaaactggtggaagggagagggcagccaatccaaaacctggctaacattaaaacagggatggtttgccttcggatctcacctggattcacagtgcattgagagttaggcttgcgtttttaaaaatgtacgtaagttagcatctgccagtgcccatcttgatctagaactaacagtgtctctctcccctacactctaccctttacaatcctttattctcttagcgaggtgaccaggaatgcgatgacaaggagttggtaagttccttgtgccctccctcccgacaacaatctgaacttaccctgtttccccaacagctgttctggatgaagaaaacacagtcataattaataacatgtgtcctgacagtatgaattaataatttatcattaagcccaaacaaatttaaattattcttcaagagccacacctttgcatatctgagaaaataaggtaaggagatggttaaaatgtccaggtaacgtgaccttcagtgaactactcgcccccaccccccggactgtatctcttggactattcttgttgaaatgctaaaataatttacagaattgaaagtaattaaacccaagaatctaaatgctgatcaaactaagtgcatgtgctagaaatgtcttcttttttaaatggggcttataaaatattcaatatttggtcaaggacactctgtaatctttctaataaagattcctaaacctagagtatgacagttgttcaggcaagtggtcataagaagattatgttctattactgtctttttttttttacttccaaaaatgcatagcgttattctggtcacaaacagtgacctgaatttttaagtccatttctaagcgtaaatttctacaaatggtgaaaaattaagaaaagctaccaagtctatgtctccagtccttacaattcaggttttttttttgttttttttttaaagaaaatccagaaacaggggaaaaatattgatagccattgtttagtgggatttaaaaatttagtgactaattgcaaatactggaaactggaattaatctgtctggatttttttaaaaaggcttacagacatttaaatgcatgtatcgggacactttatcaacctaacataaaattgtcatcttatcttattatatgactattttatgcatgtgtcaaagaatttaaaaatgactgcctgtctattgagtctaattacaactgcacattatctgtctggatgtaccagtccatatcattgttactaaatacaatatattgtattcacctttcatttgtaacttcagacagagaaaccacaatttagagcataactaaaacacagacacagacacacacacgcacacacagagtgaacacctgcaagggtttgggatactggataccactgttcccttctgtccttttcccctccatgggctttgagggtgatgctacaggggtgtgataaagcagctgatttgaaagatccaactacctacctgggctggacactaacacagaagggtagacacacacaccctactttatttcatttttattaattgttttacgacatgaccaaagctatttttaccctctgcccagtgacaggcagggatgaaaatggggcaggaggaaagccttacaaactgcacttgggataactgtgaactgctgccactcttggattaaacatggctgtgtgcaccaggaccgggcacttcctaatcctttcctctctgcctccccgcgggcctgcctgcctgcctgccgcagccctggccccagcctgactctggcaggacacgtgtaaaagagaaagcaccacaagaggtccaggcactctgccttcaagaaggtaggtcctttctctttccagaaatcccaggagtggagggcggcggtaaaggaatggttttaattctctcaactcacctgggtttcacggtatttcccacagccctgagcagtcgcctttcattctaatcacttgacaaaacaatctttagcaaaaagaggggaaaaggcagacgtgtgaggcaatttagggaatcgctgctgaggcatcagttattgactatctggctcctgtttatgagcgcgctcaaggcaaaactgagaacaaaatgacaacatcaacagctcacaatcaagtgtggccctggagagcactgaagccctaactgacagctgtcaagataatgggggcaccgcagctgattctggaaggttctcttccccacgtggacatccaagggaatagccttgcctcccacctcctttgtttttctccttcgtcttcttggctttcctttttagaatttgcattgttgctctcatttcgtaggaaatgggggaagaaaaaaatcatagaacggtcaaaaccagtcgctctgccaccttgctacagagtagaatacctgtccaaggagaaatacgtggcaggtatgagacgaaaaaaattcccaaagctaaggccgaaatgcccttctgaatgctccatgtgcttccaagagagaacggaaaagctccttcctggagctgcccgatgtgtggaccagacttaggaaggtgtcatctggacaccaccaggtgggccacctcttaggcatgcccatgtctactggcaacatggaaccccctctggctgttccagggggatccacagtgttctgtggcaccagcagaccctagggggtccaagtcactttcacaaaagtcaagatgcttgaagatttacccttgccttgtttttaccacctaagaactccacggaacattaccccctttcaaagaatatagcttgctggcaaattgtggttcgatggtttctttttgttttttgtttggtttttttttcttttggaagcataagaaatggtcttttatgatttcacatttgcctccagaaaattaatataagtaaaatatctgctattaagtattacactaaaatttttctggcattttcagaaatgttttttaaaaaccactctgaacaggagaaaatcatgctttaagcaggggataatggtcattttgcctgaaggacactgtccttccctaaccccactcctctgagcttctaaaagcagcaacatctgtccagcacaaatgcacaccccctggaaattacaggtctcaaggaagcaaactcccgcccaggtttctctttggcaggtaaagaaacctctctttctctttgagaaaagaccctaagccatacatagtttctatcaaaacatcaaaaaatcctaaagtacagaaatatgtattttcagggattcttggagcctgcttcggccttcgggaaagcaatgatacattggcctagatatgaagaccgtgtgtacctgtgtgccacgtctgctcgccctacccagctcttggccttttgtggttgttattctaccctagaccattaaaagggccctaattcctatgacatgattatccaggtaccaaagcccatttgtcacctgcagcagaaaattgagttaatgcacaactaaaggcagccaggactgtgtaatatcaacttgattacatcaaactagctgcaaacctaattctgctggatgacactgcgtcgagcttgtcatctccaatcattaaagctgtcaggaatccatcaggtttacagctaattaggtgaacactaatgaagctggcaaaacaacttttctttttttatggctgagcggacctttcagtttggaggggaaaaaaattctcgagtattctcaaggttgctggggactggatttccagttaccaatcagcagacatctttcttttccccactctctctctctatcagtacaaagcaatcaatttgtcatcactcccagtatgccacaaaagctggcatgaaccttataacttgcagctgggaaaactaaaaaagaggagaaaaaaatgggaagtttctggtccatccaaacaaacaaaccacccccaaaaaaaaaacctctgtgcatacttatcaccagcctaaatgtggagttttttttttttctctccactcttcttaaataagtagctcttcagtccgcctccaccccctcctccacatgtccattaggcagaggcattctgataaagtaaatccaaaacccgagtatgggaaagaaataaagcactcatgctgccagcttctgattgaccattaagctattgatgaatgtgcctgtcaggagagagacaattaaatcaaatatgaaacaaagtcgttttgacgggtcattttgatagagcaaaaccattcttccatctcctattagtcctgcagtcaagttttttatataatgaatttttcttaactgacctgagatttcctggctggctttctttaaaaaaaaaaaaaaagtgtgaaaaggttagtgaacaggttgctctaaaaataaataaataaataaataaataaagccaacagcaggttccctcctcctctgatatttttctggaggaagctatcaaatacgagtctcagattggcagggtgcaaccgaagagatgaactagagagagagttctgaaccaaatgtaaagatgtaatcacatatggttcattggatggaggcacacacataccttaaaatgtgtatccaaaaaggaaagaaaaaaaaaatttcaaagactggaagaagcccaagacattcctactactcaactttgtgaaggattcctccaaagtttcagagtttattttgggtagataagctcattgcttgagcctggaatttaaagtagaaggtgggacgggcaagaagcaagctccaggaggttaactagggaggcggcaagctccctacaatcactcctggaattttcaaactttctaaatttgggcaacaccgaggacagagagcaaaacctgcatcctaagccccaaaccaaccctgttttcttctgagattttctgaagacactggcaggcaagtacatttctgggagaagagagaattatcattccttctctgtgaccccgtgtaaggggtctggagtgcagagtgcagccaacgtgtgaggtcccctggcagtgccggctggcatgatggaaattatgggcactcagggcaccatggctacaacgccttcctccaagatgggcaccagccaatgccctgaccctactctctgcccttccctcttaacatcaaaagagaagtaaaagaaaggaagagaaaagaaaagaaaggaagccccacttaaccctccccttcagggagcatctgaacctctgcacatctgagtgttactcatatcaaaatacatcacgtccatatgtggtcctctcggcaatccgccccaaatcccaaagttgcactgacagggccctcctgacgtcacagagcttggcctcactattgcaagtgatttattgatgtttattgggaatgaatagatcaaaggcagcagcatgacgggcgatcaatcagtcatcaaatcaaggatggcaacgggccagaaacccttcttccaggcaacatgcccccaaccgacattattgcaaaataatgttatgtgtgtggtttttgttttgttttcaatgatgcgttttccagaaaagaaaagaaaaaaatcggctcagtcttaacaggagttgacactcccggttaaagaagaagaaaaaaaaaaaaaaaggaggaacaaaaaagtactcagacacgtcccagaactaagtgctatgcggagatgagggtgggagcagcagtacaaggagggggtgggggcgaggaaacacaaacaggggagaaggaaacgccagcatctaacatggacttgacagtcatctgacaatacccagaccctgtgcgctccgggttccaccgctgtgcccagtttgggcccaagaaatgaggaatcaatcgtgttagtactaaggtggccgaggggaccggctcgctcactcgttcgcgctccctggctcggcggacaccaggcagtcccccggcggtcggccgctcggaggacgcggaagatgtcccggggaactcaggtgaccccgcccgccacccacagaaagagccaggccggggttgcttcccattccctctgcagccggagagctgaggaggtagggacctggcgcggctcagcgcgctccgcgagcggctccccaaatgggtgcgagagggaagagggcagagcgcggcggggcgtccggggggcgcccggtacccgaggcgggcgcacgcacccaaacaggagagcggcgcccggagttactcagtgcgggcagaagagcggggcgaggagcggggtcgcgcccgctggaggcgcggggcgagcggaggaagaggaggaggagagcagaaggaaggggaagcggctcgtacctgctgcgcgccggggcgcctgctgcttcctcctcggcatgatgcttctccggcgactgccactgccgccgccgccgccgctgccgggctgaggacagggagggagggggcggcgggcccgcgggggggcgaggcgggcctgctctcagcctcccccccggagagcggccgcccgcaggatgctgctgcgcccaggctctccgcgtcccccccgcgccgcgctccgccgcgaaccccgaacgtgcggagggaagaaggagggcgggcgagggaggctcggggagggaggagcacgggggggaggaggaggcagaggaggaggaggtggaggaggaggaggaggaccgcgctgccggcggaatgggaagtttgacaaatcgctccagaggccagaggaggagggggcggggaggagcggcggccctgcccccccccgccccgtccccagacgaggtgcgcggggttcggggctggggggcggggagagggcgggcagagcggtgggaggaggagcgcgggagcggcccggaccggtactgccccggcccccgcccctaggccgggggtcacggcatccggggggacgcgcagccgccgccgcggcccggggctcggcggtccagtcttctgcccgtggcgcggctggagcggcggcgtcggcaacaggcaagcttaaaggaaaaggagatgatcgtgtcaatcgcccgcccgcgggggcgccgcgcccccgcccccggccccaggcccgcgtgggacccccgccccgccagcgaaaggggtgccgcccctccgcctccgccccgtgcgcacacgcgggggcgcggcgccagccccgccgagcccgtcccggggcgctcgttaccccccacccctattcccacccagcgttcgtccccagccaccccccagctgccccacccggctcgcactcctctccacccgccgactccggagcccccagcgtggtccccgggccggggctggcgtcccccggggaagccagagcccacgggcaggccccctccagggaggaggcgggcgcgggccggggcgggtgggggcagccctcagaccccgcgccacccagctcctcccccaggacccgccgtagccacttcccccaattttttttccccggacaaactttcctgggcccgtcccgggggtcggtgtgggagggggttccttcaagtttcctctcctgactttgggatgatcagggtccctccaccccgcccctcgcccccgggagccgggccgcgccccccatccacggcgcgggccgatcctagggcgggacgggggcgggagaaggaaaccgggctcccctgcccatcccccgccaggggctccccccgagagcctagggggccgccgcgccgtgtcccgcgcccggcctgccggggctgctggactagagggattgattattgattggtgatcggggtcgctgaggctccgggccggcccggccgactggccgcggcaagaaggagctggctgggcggcgtgggcggcggggcgacgcgggctcacttacgggcggcggtgagggcgcgggtgggccggagctcatgcgggcgacccccgggcggcggcggctgagcgggagccggagcccgagcggcgcgggcggcggcgcatcgatgcgctgcgggctcgattgcgtctccctgggccagctctcaggccgggaatggggcggccgcgccggggccggctccgggcgctgccgggcggcggctgctggagcgcgggggcggcctccgggcccactatccccgaggcggccctgcgcccgggcgcgccggctggggctctggcgctctcgcaggccccgaggccgacagtcccggcgagggcgggcgccccgcgctccagcaccggctgcctgagcgctcctggagcagcaaaccccagacttcttcctccttctctccttccttccttccccctccccttatctttttctttttttagtctctttctccctctttttctgccctgtgtcctttttattttttctctacgactgtttttgcaagtttgtttcaaaagttcacagcatgctttcttttcttttagaccgggagacagtgatctcacccacacggtaagatcaaaagtctccgctcgcccagcctgcgggcttgggctgggtccagacgtctcccaggatgcagatgcgccgccgctggcctccccggctataaagccgcctccagcgcctttccgcgcgcaggagcgctcggagttgtggggtacggaccccaggcggggcagggagtccgaggcgggctgcggcggggctctcgggctggcggactcgggggctgaggcgccgtgcgcgttgggtgcccgcggccgcagaggccagaaccgctactcctccaggccggggagacgcggccgtggagcgtgaaacgcttcttgcaagcgaggaaacggtgagttggccgacaccgccggcggcctcaccattctggtggccgcgctgagctcctgtcgcctggaggcgggttgcgccgcacggggtcagctcccgccggctcccagctcaccttcgaagctcccacttaggcgcgcccggtgcggcgtgtgcacagcgcggggcgccgcacacggaagcgtgtagttctccctggtcgcgcttttctcctcctttccatcccctcgctgttcttgcaaacctctgttccttcggccccctcccactgcgggccgcggcctgaactcgggtctccgcgtagccggccgccgccgctgggtcgctgcctggccctcccccgctcaggcgccgagcgctgtgcgatccgccctaacatctgtccgtccaaccattggcgcatccatcagtgtcaatgggctgcacattgcagcgacagcccgccacgcacaacacgggctatgcggagtgcacgcagcaaccatactgccatgtcgggacacgcaaaaaggcccccggcctggcttggcacagcctgaaggcctaatctgtgttctttcagccacatgtacccacccccacttaatatctggacccccaaacatgaatagttttgcagaccattgtagggatggaattgaaggaagaggggcagtgtcgcccgagtcattattttccaccaggttttctctgcccttgtgtgggctgggtgtggctaggagagaaggaagggagacttcccaaatccgcaccaagcacactgcagaaccggaagctacctggatgcaagggcttaaacccccttcacctgggcctaggatgtgttgtcgaggtcgctggccaggttttagccaggaggtctcgcgctaaaactttttggccccgcctggctgctgtgtgtgacatggcctgatggagaggagctggagagcggaggaaaacgtggatcccagtgagaactaagggccagatttagggagaaatagtgtctggatggcagtaagtctgtaattcacattttgtttacaaagggagaaagggcagggctgtaggtttgagaagccagaggtttgcgcggagttccgtgtgcccattccccgagagtgccgctcttggctgtagttgtttgttctacctgattttgcctcttgccttcaactcccccataacccctccccaaatgtccagagggcaaacatatgcgcatacctccctgatcaatccagccagaccaaagggccttccctgtcctccccctaagaacttaatgggaagagtgtacgggggacctactcttgggacatctgcagggcggctgtaccaggcgttttacctgactttattcttaccgcaaagatttccgtctcggtacctggtgccccctcagagtccactacacaaacgggtaaaatcccgcgcggctattcatttcgccattcgcgagtaagaaggggaaaaggagccgcttctaggagagcactgaggtatgctcggttcggttcccgaggaggccagaagcggccgcggcggcgcgggctggagctccctcctgcagggagacaccgcgctctagggtgcgggcttcgccgcccacatccagtggtcgaactgttttcacgctagactagagggcggaaaagtctgcgcccgcggagaaactagaattctgtagaatgtacactgtgtagaaatcttttcaccccactcttcagagttgcagattatctttgaaaaacaacaggctctggccctgccagccctagtaacttctacccgcctgagtcactctgaaaagtaagcccctaggccagtgagatgtccccacctttgggaggtgccgcctttccgggaacattaaaaaaaaaaccctaaaaatagaaggaggaaaaatgagcaaaggcggtgggacgactcaccgaaacaccgaggtgcaaatgtccattggagaaactggcagtcgcatggcagccagctggctcacccaatagctgggtggtaaccttgtgatccccaaacatcccccagggccatgaaggcagtgctgacccccacgattgcacctcaggcccggtggaatcccgctcctcctccatagtggtgctatgtaatcagtagaaaatcagtagaaaagctcccaaatgaagctgcttcaggtcaggggttagaaatctgcctcagactttttgaactcaaggaaatcgggacatctgtccccagagctacctgtgccccaccccaggatcattcatgaccttagctaccgggagctctgcccggataagtttttaaaagagagagagaaagaaaaaagtcacatgcaggcaaggctaggaacaggtgtgtgctgtggggacgggcacttggctcgcaacacaccacacaaagtcacgaagtctgtgccagaaaggagtagccaaaccaccgccgggaggcagccgaggttgtgtttaaggtggcgattgagggcagtaggtgacaactcgacccaaagaaggccaagtcttgtccttatctggggtggccactgagggaaaagacttaagggaaagaagttgtcttcaaagctaccattacaagatgaggagctagagtgggctcaggtcccaggcacccagggcttaagccttgatgttggagaggttctcggagggaggcttgggccacctggagggactgggcactctgagtagtaccctctgggaggctgtaccccctttcaaagtgtgagggcatttgcccaaggtgtaggcttttagggagcccagggctgggcagcaccaggggagagaggcaccaggtgggtgccctcctgcctgcactcacctggaatgctggcatatgggtttttcgccttcctcacgcctccccacaccacattctgggctaggcagtgtcgaggaggtgccttgggttcagggaagcttgccacctgcacacctgaaccaggaattgggccccggaatctcagcccctgcccaagcaggaaggatagggaccctggccctcgccaggtggtaaattgtttgctaaaagtgcatttacacggcggcgaagtttgtttctcttttaccggtagctttgttttaacgaaccagatgttttgtctgtaaattctcccaagaacttttccagttttgacgtgaaataaaccttcgaaaatcagaagagtatattaataccacttctgtggggcctcaggagagctgagtcaggtgtgcctggatgggagctgggggtgggagtacaatctttggagagaagtagggggcttctcttggcccaaggtcaagaattggtttgggggaggtgaagtgcctccccgactcccaaaacaggcgcacacacacgcattgtcacaccagagtacgcactcccagccctcctccaaccaggcatagcttgctacttcgtaaatttcttgtggcttggggcacagagatgtagctcaactttgcagactgtgtccactgcatgccgctgccgttttccacgaggaccgcctgactgaaaggcaaaggggccttcgatcttcttcccggggcagctttgatgcctgagtgtgcggggccggggccggggccagggcagagcagggtggaagctggtgcccctgtctggcccacccttaactcctgggcaccactcgattcgggagaacttggggtggaagccgacctggtctaggaagccacagcctgcaggtccccctctccaatgcctcattttttccgatttaggatttccaggcagttataaacaccttaaaaaaaaagacccacttaacaatacacctaaaagagggagggaaggaaggaaggagtacggttatcacaggcgtgtggggagagggaaaccaggtctgcctagaaacccaccttctggtcctgtgagtcatagcggccactttctcgggtttcccaagacaggagatggcgattttctgctccctcccctctccccaagctttccagtgctctgagtctcacatcttcagatacctctttcttccttcattctctttcgttcaatcatctacggaactttcaaaaactttttttttaggagagcgaagattaaataaagaaaataaaacgtctttgtatttcagtctaaggaggacagatgcacattaaactcagtttggagcgcttaactccaggcgaaatgcccttttatcaaatcccacgcgtcgacttgggttgcgctgggaatttcacgaattcctcgctgcagcgtggcgtggtttacccccacccccaccgccaccccactttgggtgaaatggatttttggaaaccatttaagcagagctaaaaataagggtggggggatccctacactagagatagctgcagccacctaggggctcacccctggtcgggagcgagcagctatttgctagttgtagctcaggggtgcccaactcttcccgtgtggttgcgccagctgccccgcactgcaggtatctgaatcattacgtgggcaacctgatgcggctctgaaccccagctctttgaatgctggaatcctgaaggaggaggattccaccaggtcttagccgaccagatagcccagctttctgaggctggtgacctcattaactggccagggaatttgcaagaccaggaataatcacgtttcccagttcttctttcctacattgcttttctcctctgtcttcaacgttagggttttgtgtttgtccctaaatttacaatttacaaacggggaagacggagcctaagtttctgcagggcaggtacaaaagagagggacaacactctgggggcctcattctttcacgtttttgtttcttgaaatttgatggatatcaccttagttcggcaataggagggccagggtgactggggacatggtggcccgaagggttagataatatagcatgcaggtagtctctgatctccagggctttgataacaccaagattttcctcctttgcagagcagtcctaaattctgccttctcccttttctgccgcctcttctcttttccccatttctttcttcgtttctttttctgttttctttttgtgtgcctctcttccaacagtccctcctccacctttataagacttctcaaaggttatttatttaaggtctaccaagtgctagccccaaacaggtccagtccttctacctgtggcaagacggaggctgttaccgcgtgcaaatagtgagggaacaaagtagtttggagttttttgcagcttttttaggtgaggggaagggagggaggtcagaaataggttgacacttggtttgaaataaaagagcatgttaagaagtttcgaagctgccaataaaaccctttaagtggcttgtgattcagtgcctggagttgcggggatggcattggtaaatgactctaatgcccaaagaaaaatattacaaatgccgctgtctcggccaccaatcgggcgccgctttcctgcgcgggcgatggctcctctctggcgcggagggcacccacatttgcatgataaattgaccagactggcggcagccaatgaaatattcaaattaggctgggtggcggtagtaggggtggagtccctggggctgccccttggcgcggcggcgggagcgggcgctaccacctctccgtcagcgccctctggaggcgggacagcgcgggcggccgctctggcccaaaagacgagatggggggttgggggtttgggatgcaagggggtttgggaggggtgatggtggggtctgggtggtgcttcgcggccccaggaggctttccggctggcctcgttgactaggcgtacagcagcgtctccgcatgcctcttgcccttaaaagtgttgatggattgcagaagtggatggtgaccccaaggaggggtttcagaaaggctccagcctccttcgcccaaccaccttctctaggttcccctaacaaacccatcacttaagttaaaaacgtgtatttgctcttgttgacttagctttaagacaagattcttgcccaccgcagaccacatggccagctttcccaaaggccctctgataatgaaatggtggagcagatatatcaaactttccatcttgccctgagccaacgaccctgcaccctcacaggccagggcactctggagggcaccctgcctggagccccaaaccttgggtaagctgtgggagcctaggcaggggcaggcagtgcctggaggctggcttcagacggcagaacttctcacctgggaaaatgctttctggaagaagcacccaggcctcaaggcagctccagtgagggggcaaaaagggatatacataaggcataaggcgctggccatggttaggtaggtgctcagccaggaagatagggcagattcacatgggggagattggctcggtgatgagaccacttctgactccaccagaaccaggcccagctcttcctggaggtcctgactcaacggggacttttgcatgggagccaaagaacagtggatgtctcttgtccgctgatcatctcttcccttcccccaccccatattccatcccatgccagatccctaggctgtgcctgttagagctactgtagcaccacatggacttgcctttaaagcagaatttttagaagtgcagttgcttttctttactctgctgtgggatgctgaacaccttgttctttctccagctcagcagggcttggagttggttcctagctatctctgggaatgctcgatccccatctctgttaccagccaaaagggtctgcgggaggtggtcggcactccagtcagcagccctctcagtacctcttccccagacatagtcaaagcaagtcattcatctgcagccagtctcccctgcccattcaccaaggagaacctggggataggaccactcagagcctggcccaggctggctcactaactgtgtgtaaatacacacagcggaaagagtaggtgctgaacacacatgtgtgagagagtgaatttttactctcaatcaccttatatatattatcaatagtttcaaagtatgttgcccaaaggatgttaattcctaagaaggcttttatatcgtttggagttttgaggagtgtgttggctgaagagaagagggtctggccccagtcttgatgggaatgcatggggtaaacagctggtggcagaggtacaaaaggggcctctctactttctaagagaatcttccatcctggctgattttaggacctggggtggggttcccatcaggaggaggcctaaggaaggagtaggacccttcctagatggctgagtcaacttatacgacagggcagggaaacctatcttggaaacccgggagccctccttcctcctccccatcctcaggcctcacctgagacttgaaaatggaccagagtcttcctccaacagtgaaattcgttaaagagtcactcctgtctagaatgtgcagaaatgcaagcctctctctttctctctctctctctttctccaccttgaggatgctgtatctagagcccatatagggacaagaaggtaagcagtgaaagcaggaaagaagtagaaggctggctgtcatccagctgtgcatacagtcctatctcagctgaactgtgcacggtgaatgaggaagtaaatgacaggtgaaggaccaagagagtgaagctagtcagtttatctgaggagataggtatcagtgagtaactgtaaggatcacacccacagtgggtgtgccccgcagatggatatatgtgcagcaagcggtaccttgcgggggaatgcaagctccaactgtggtgctgagcctctggcccataagtaacccagtgagcctgagcaggtcactccctctctttgaaccttgtctccatctctaaaacaggacagctttctccatcttaaacaccaagtaggaattcattgtggaaaccttccatcaaaattggagatgccttggatggaccctgtggtggctcatgcctgtaatcccagcactttgggaggctgcggcaggcagatcacttgagtccaggagtttgagaccagcctgggtgacatgacaaaaccctctctccacaaaaaatacaaaaattagctgggcatggtggcatgcacctgtaatctcagctacttgggaggctgaggcaggaggatcgcttgagcctgggaggttgaggctgtagtgagccgagatagtgccactgcactccagtctgggcaacagagtgagaccctgtctcaaaaaaacaaaaaatagagaaatagagatgccccttgaacccatgggtttttgggactacattctggaagctttcagagtcagaccagagtttgaaagaggcattgtgtcactagccgtgtgcccgtgggcaagtcacagtagagtctacttcccacggcacttgtgagactcatctgggattatgtgtgtccatgccttggcagagagcttggtgaagaatgttagttgtccaataaatggtaccccattaagttggtgtgcagggtggccacagggccagaccaccctgaaaataaaggcttatatttgggctgagcctggatgcacctgagattacaagcaggtgcttagaatgtggtgaaaaagaaagacaggagagaatggctgaaggcagcatgcagtccacctgactttctgggaagattgggcatttgcagggctgataagtcaggttcttccgggcctttctgtgagctcattagaggaaggggtctggtgactgatatttctattttccctgttagtagcgactggaatttgcaccatccaggtcagatggaaaatagaaggcgggaaaatctgacagtctcattgatttgctctctttgccatcaccactcttgagaggaagaaatgtgacttcaaacttgcaattaggaaccagcctgctaaggagtcctctcgtgagctcctgtgctatgcggagcacaggcccatctcatctcatttcctaaggaggtaggttcattcatggtttcagcaggagcaggcagtgcaaacgtgtgacacccgcccgcaaataactgccagaaaggccgtccaatgcttccttcacatttttggtcagatctctgaaaagatggccattctcccaatgttttaaaagtattaacttcctttcaaacatcctttaacctttaatgttttgtaacttgatgaaaaggtcattttgtgctgaggatgcagttgttccggaattgttcagctaacggggtgaattccaaccaaatccagaattatttaatgggatccaacgccccggccacacgcacaataagtgaatattttcccatatatgtctgtgtacaggtacatgtacttgtgcatatgtatttacatatttgtatctatgcatgcacatatactcattgggacttggattcaatggacatttttagccttctcacaaaatgacttatcctttgcaggaaaatagatattaaacttactcttttgaacacattttgctaaatatttgatggcaattatttatggtgcactgtacttattcctgatttcttacagaaggggttgggtcaatttctaattcaacatttcattgctgtctctacaataaatgcctccagaagcttaggagaattgagaggtttttttcctctctcttctttcacagtgtgagctttttaactgtcactggctagagcagtccttcttcacttttaccttccttagctgatgtattcttggaaacagatggctgagcatgttagatttatatttaaaataagagtagagttaataggctcaaataagagcaggaaggtattttctacaaggaaactgcatgaagtttatgcctggactctggaagatgtgttaatacttttacttattcaagaggcattgggttgtggtctgctatgtttcttgctctgatgactgagtttttaagataaaggctctccgggcaaataaggaacagttggatagagtagctcaccttaagtctctatagactcatgtagagaacaaatctgatctaaactgtgtaaaaaaatgagtaagagaactctataagattaacactcttattaaacttaaaagagaaaattggtactttttttttttttcttagacagagacttgctctgctgctcagggtgaagcacagtggcacaatgtcggctcactgcactcacctctgcctcctgggttcaagcgtttcttctgcctcagcttcccgaatagctgggattgcaggcatgcaccaccacacccagctaatttttgtacttttagtacagacagggtttcaacaggttggccaggatggtctcgaactcctaacttcaagtgatccacctgcctcagcttcccaaagttctgggattacagggcaccaaaaattggcacttttaaaaggagacaagttttacttaaaagcaaaagcctttaacaggcctttggctggattaaatgataatgaagcgaagcaaagcttgtgaccactctgtagagccatccagatagtctctctttggggccagatcctctagaatgcatgatttagggtcattcattgcacattcctggcttcagactggttttctgaatttccctgcaatctgatttttgtcttcctacatttctgtgtgtgagatacatcaaaaggtaaaagaatgtgtgaatcatataggtacggtttaaataatacctgcatacacaacactcagtcacctgaaaccccccgacacctcccaattccagtcccctctcctggaggccacctctatttttaatttttgtaatgatcacttccttgccttactttgtagttttaatatttagatgtgtatacctggtcatgttcataaatgaaatcatgttgtatgaattattttgtgtcttgtttctcttactcagcattgtttttcggacttaaccatgtggatttgtgttgctggttcatggtcaaggttctagactatgaaaacattagtttcatgaaaacattaggattttttccccccaattgtttggatatcatgaagaatgccgctgcgaacatgtttgttcctatgccataactcacatggggaatatctcctatttatatatagttaggggtgggattgcttggtcagagtttgcatatctgcagctctaactgttttccaagatgattgtgtcaattttcactcccacaagcagtttttaaagttcccattgttctacatccttgccagcctatgatattgttagcaatgtttcttcgtatttgtaatgtttcctaatctagcggctgtggttgctgtctcactgtgtttaatttgcatttccatgattactaatgagtttgagcaccttttttatatctgcgtggtgatcgggaatgccttatttgtgagatgcctgttcaagtcctgccattatccgttgcatatatgtttcacattatttcacccaagttctctgttgcccaggtttgtttcagattggtttgggacagtggatcagatcagaaatgtttcagtgacatctctcactatatttcctaggatgcttttatctgtgagaaatacgaccccctgctcacactggcttaaggaaattggcaagaggtagattatggctccattatattaacaggaagccagtttgctctgccttcttactcttcgcttcgttttcggcataatctcatcctcaaggtgttttatcttatgatttcaagaggaccacaaatggcgagtggaactaattgcttctttgtccacattccacaaggaagagaataatagaaaacttttcattgacccatgtaatctaagtcatacccttcagtttccaggggccacgtccatgaagcaggaggcatctgcagtgaatgccatgccctgacgccttactgagcactcctagtaggacaaaatgagtactgtatggggaggaggcaacctcaaacaaccaccatgcttactgccaagcctataggatatttttaaattcattttttaatttgcatataataaaatgcatttttttgggatgcagttttctgagttttgccaaatgcacaaaatcacataactaccactgccatcaagatttggaacagtggctaggtgtggtggtggcttacacctgtaatcccagcacattgggaggctgaggcaggagcatcgcttgagcccaggacttcaagatcagcttgagcaacatagtgagaccccatctttacaaaaaactttttaaaaattagctgggcatggtggcatgtgcctgtagccccagctacttggaaggctaaggcaggaggatcacttgaacctgggaggttgaggctgcagtgtgctgtgattgcaccgctgtactccagcctgggtgacagaggaaaaccccatctcaaaaattttttttaaaagatttagagtcgttttcttttttttcttttttttttttggacagagtttggctcttgtcgccggggctggaatgcaatagtacaatcttggctcactgcaacctccacctcccaggttcaagtgattcttctgcctcagcctcccgagtggctgggactacaggtgcccagcaccacacctggcttttttttttttttttttttttttttttttttttttttttagtagaggcagggtttcaccatgttgacaggctggtctcgaactcctaacctcaggtgatccaccctttttgacctcccaaagtgctgtgattataggcatgagccaccgtgcctggcctagaatagttttcttactcccccaaaactgctttatgctgcctttttgtagtcaaactatctgcctgcccttaaccccagctcccccgcattagaaaccactgaacctctgatctgttcttcaccttaaagctttcccttttccagggtgtagcgtatgtggaattatagagtatgtcacctttcaagtctggcttctttcatctagtgtaatgcatttgagatttatctatgttgtcggatgtatcagtaagtttgtgtcttagcagtgctgagaagtattcctttgcatggatgtacccagatctgtttatccattcatcagttagaggacaactgggttgtttccagtttggggtgattacaaataaagccacgatgtacaagcacctctaggttttgggtgaacataagttttcatttctcttaagtttcaatacctaggagaatgattgctaggtcaatggtaagagcgtgtataatgctacaagaaagtgctaaactgttttccaaagtgagtgtagcattttgtatccccgctagcaatgaaatgagagctccgcttgctctgtaagaggcattagtgaatatgaaagtgctttgtaaagactaagggtgtctcacagtgtgcccaggcgggaggattcagagggggcatttctaaactctaaactcctgtgggctcctagcccatccttctgaatggggacagaatacttccatttccaggttacttgcttctccaaaagggagacagggaagtatccttctctttttgcaaatgagggcacagcactgcctctcgtggttgagccagtcattattcagtaggaacagcagtgagattctccagccttctattttattcctggggtcacagagtaaaatgcagcgtgatcatttggagcattcttatgctttgtgacaagaacaaagccagtggaaacagccatgtgtccaatcagaatgtcagagctggcagggaccttagcaattgtcactttacagatgataacctattacatccccaggtccccagaatcccagcccaggactcactccctcagccttcctggattgtcctgggtggaacaagatcagctcatttagcacatagtcttccagaacacaaggcagtgtcccaccaaggttggatgggaccagcttctctatccacagtagctgtgcacacagagacagaaatgaagccgtactgccgggtgcaccgtggccagagatcctccttcctggtatatactcccggagccattgcttctttcatttcagtgcccatttctgaggcaccttcacatttcaaacgtcctgagaatatgtttaattagaacttggccatacagccttttaaaacaaaacagaagggaccagctaattatatcactcagcattctgtggcaaacatatattttttaataaaacactttcctaaccagagtaatccctggagatgcaaatcctcatttataagaagtttcccaaagggagttaaagagaagatgccttataaagaaaagagacaaagagagtggggaagtgttttcaaagagcttttaaaagatacactcattctgaggttgaattacagatattttaagggtaccaaattttatttcagatgtaatcctttcctgtgtttttgatcatgtatttccgttttttccctttttgatcattgccacaaatgcccatatttctctttctggtgtctttcataagtgcaatatttaaataaacaagggattttcccaaaatgcacctcatctcctactctttgtcatttccttgtcttgctctgtaaataaccgtgtgtctcacagcagagcttacacagaatggatgtggggcagtctgtggtcctggggagggccttccctgtaatctctgcagcccaggacagggagagggaagatttagatcctgctgcggcatgtcttcaggagtggaggtcagcttgggacatttacgttcatgaggcagccgcagagggtcagagcaataattgtgccagctgatgtttgctgcggggtttactccaagccaggccacacgctaagaaattaggtatcgtacctcatttaatcctcacaatcctcacaaaatgtagttgttttgctccattttgcagatgaagaagacgaggcttgagagacgaaggaatgaatgaagggtctcacagctgttagaagggttagatcttgtatttggactcaggtctgcctgccctggaacttgactctcccacacctggtgctgggcacactaggagacgtcacaaggctcagagatgccacccttcctagaacgggcgccgtgcctctcttctccacacactgcaggggagacaggcactgtgttttcagataagttccatgtgcatcaggggctcggtgggaaagggaggacacactcagattaggattattcatggaggattctccaaagaggctatttggaaagacggagggaatggtgaaggaaagcacaagagaaaatggacagaaccgttacttcctcacgcctgaaggggatgggttactggaagccaggaggagagtgtgataagagccacttttagaggagctttcaccttcaggagaaagtcagggcccaagaagacccacagggaggtgaccagggaatggcatacttggactaccctctcttctgttcctccactctcctgccagggctccacattggataaacccctgcaggggcgagtgaaactgccacccaggtttgcctcccagggcacagcccatggagagctctaaggcaagtggcagaaaactagcacaggtgcagtgcgtcttgcaaagcacccagcctatgccggccctgggctagaaatgggaagagaggagaccatggcactgccctcaaagatcttagagtctgtggaggagtcaggcagagagagggggtgttcccttggcaaaggactccatgagcagatgcaggccatgggcgacgctcctgcagaagctttggggtttgccgcatgtgcctggaaggagcgcgcccaccttgacatgcctcgcctcctgttgccattgacaacgtgaaggcaaactcctggggctgggcctttttccttgagataaaatatgtataattctctgttatcaaatgattattaaacaaaatctaattgaaaaaatagaaagaagaaaagataagtcatttatcatcctgttctccaaagacaactgtgaacagcttggtggaactccttccagtggctttccttggagctttgcctctgtggatgtggtaagagtcggatgcgattttgaattttgagattttgattgagcattgttgtagtattttgccatgttatgataaatcattggcaaacatagtttttgacggctgcataatattctgcataatattcataataatgaatgctagtatagttcatattataattcttctactgtatttatttatttatttatttttgagatagagtcttgctttgtcaccgaggctggaatgcagtggcgcgatctcagctcactgcaacctccacctcctgagttcaagctgtcctcccacctcagcctccttcaatagctgtgactacaggtattcgccaccatgctggactaatttttgcattttttagtagagacggggtttcaccatgttggccaggctggtcttgaactcctgacctcaggtgatctgcccgcttcggcctcccacagtgctgggattacaggcatgagccaccacgctcagccttcttctactgtttaaatgtttaggttatatcctgtttcattaatattaaagaatgctataattaaaaactttgtgtatagagaatttttccatgtttcagattatttatccaggatgatgtctctaaaataaagctactagaggttgaagtatctagcccagggccagccacagaatagacacaacttggttgataactattgttgttcagtggtgagtgtttatgtaaagctcttctgcaattaagaactgctccaaagtccttcctctagaacagcgcttgaatatgatgtgagccacgtaattctcaatgttataataaccacatttcaaaaagcagacacagttgaaattaattttaataataccttttactggagctgggcatggtgtcaggcctgtaatcccagcactttgggaggccgagttgggcagatcacatgagcccaggagtttgagaccaggctgagcaacatggcaaaacctcatctctacagacaaatacaaaaattagccaaataggtggtgtgtggctgtagtcccagctactcgggaggctgaggtgagaggatcacttgagcctggggggttaaggctgcagtgagccaagattgcaccagcgtaccccaacctgggtgacaaagtaagaccctgtctcaaaaaaaaacattaattaattaaaacaaacataaaaatacattttacttaaccgattatatctaaaatattatttcaacatatgattatatgtaatcaacataaaatttatcaatgagatagtctacatttttttcccatgtaaacctttgaaatctgatgtatagattttatgcttacaacacagctccattcaaaccagcctcattcccagtgttcagtagccacgtgggtgcctgatagccactgtggacagtgcaggtctagggcaaggaacccaccagagatatttgccactgttggcatcttcacctagccctgaaatccagccaccttttaatgcctccccgaacccccttactggcgttctggactgagggtggaccgggtggccaggtgtgacatgacttctgtacctggacatttttaccagtcgtcctcattcctgccttgaccttgaccttagccaatcacagcatccctctatcccagtgtgcctggcactggttcattcagagacattgcacacttcccgcatggtaagccctgggcctgaccctagggatacaggtggacaaacagaactttcttgtaaaatttaattacagaacttgtcagtgtttttacggtctagtgggggagacagactttaatcaaatcatcacacaaatatatatagtttctaaatgtggttaagtgctacaagggaaatgcacttttaaaaatgctaacactgggtcatggcatgagtggcccgccctgaaggcatttaataaaggtggcccagcccctggccaggctgtcttagggaacattcatgtgaaagatgagagtgagataagaggatctcagtttccttctggtatccagggtccctaagctacattaacagagtttctaggacagacagtagctcaccggttcctgtgtctggggcccagttgatcaatttgttgtttgtcatctctaaaaagtattgcggccagctggaacataaaagtaatgaggaaacaggccaggtgcagtggctcatgcctgtaatcccagcactttgggaggctgaggtgggcgggggatcacctgaggtcgggagtttgagatcagcctcaccaacatgactaaaacctgtctctaccgaaaatacaaaattagccgggcatggtggcacacgcctgtaatcccagctacttgggaggctgaggcaggagaatcacttgaacctggaaggcggagattgcaatgagccgagatcgtgccactgcactgcagcctggggaacaagagtgaaactctgtctcaaaaacaaacaaacaaaaaagtgatgaggaagcagaaggctacccattcattcattcattcattcatttgttcctgtgttcacgcagcaactctcagtgagtgctctgtgggatgccaggcaggctctgcacagtcagaatggcaaagtcagccttctctctggcagattacacactgccaactgaacacacttttccggggaacatatccacttaaaagagaggaaaaatcaatgctaatagaactccttatctggttccaaaaatgacatcgtccgtagtggctgatgctttgagcccatggctgctctggaggcatgagccctgcatggacacaattttgtaagctcctcgaacctggccaaatcaatcaatgagaggctgcagcatggagagagtctgggttccaggggcaaactgtaccattcctcttctaacctgaaacaggacggagaccctcccttcaacctccagcccctagggacagggtaatttcagctgcacctgatgtaccctatacatcactgtcttctccaccagctctcaaattaaactctgatgtataaagttaaacaaaaatgagataaaatttggcagaggttgaagagggtcaaagtagtccaaacataaggtagactattgcttcttttgatttatgttattctgtacactgagaaaaaaataaaattataaatctccccgagactttctcattgagaatgaggcattgctaattgattttcaatagactcccagggttttcagctgggaggagcactatagctgttgtttgtagtgaagatgccatggttcgacctcggacatgtactgtgatgatgtaaaaatatcctgcaaaattaacatctgcaggcagtgatgttgaaaaccaccctgccttacctggctcatgtcacagaccacagtgtctgtccttccttattttcttatttaatccttgcaaacccctaatatgtgacacacagaattcactgtccccttttggcagttagggaaactgaggcttaaagaaaccacgtgtcttcagtaaatattagcatgtctactaaatggctgggacacagaagtgaacaagaccagtaccctctcctagagaccttcttccagtacaagagacgataatcaagtcaaatgactaaatataaaggattattagtgtgtagaattaattgtgaggaaatggaagtgggaaaagggatagagaaaaaggggtatagaaagccaagggagggccttaacaagggaatatttaacagtaaaacagtaagatttacttttttttttttttttgagatagggtcttgctctgtcacccaggctggagttcagtggtactatcaaagctcactgcagcctcaaactcctgggctcaaacaatcctctcacctcagcctctcaagtagctgggattataggtacacaacaacacacctggcttattttttaattttttgtagagatgggatctcactatgttgtccaggctggtcttgaactcctggcctcaaaggatccttctacctcagcctcccaaagcactgggattacaggcataagccaccaagcctggcccaagatatacatttttaaaggatggtgaaggctgctgtgtgtagaactaactcagggggacaagggcaacatcagagagaccagttagtaggctgtgctcattttctggacaagatatggtggtgagttgggccaggtggtggcaggagtggtaggttgcagagcttagaacaattttgaagataaggtgtctccaagggatctgttcctgctccgttgctctttccacagcacgctacctgcagcttctgctggtatcactgcaccagactctggagcacgctgcttctctggaggaggataaagacagggaggctatctagggagataagactgcaccagcaggcagcaggggcttccgagaagagggcccctagtcctggctgcgtatgtgcttgtgtgtgtcacttgcgatgtgcataatcatcttcagtcttatttttcccaggtaactgcaaaaggtaatttccagctcatttagctctgttctttccctaagctcctctagtctggcttttgtctctgccactcctaccaaaaccactctgctcaaggccatgatcaatgtctccattgcctagtccaggacagtcagagctgctctgggacagatacaccagatgcatgagtttcctgatagagcaggatctcagtggaggctcgatgcccacctgcctgatgctgtgggatggatttctgcacagatgcaacctctgtgggcagaggccaggatgaggcttatgtggctgtgaagacagcctttgatctgttttctgatgcaaccacagtgctgcaggccctgcttcatcttggaggtttgatgagtgcagacatgagaggtttctaggtagagctgagccctgggctctcgagtctcctctgtctgcatatctgcatgtggttggcaaagtgccagccaacctcagtgcaaccctcaccaagttctcaaggaacagcctctgaaagtccctctctatgctgagttctagggaaggaaaaggaactcagggaatagaagagctgatctgcccaagtcatacatttcttgggggcacaggaggactacatctctcatgctcacttgaaattaactgtggccactcaaattaaggtttaccagatggaacatgagcgggagtgatgtgttctctctaaaggcctaacccatgaaaaacctattgggaacactcccccatgctcttttccattccatgagctggatgcagatgatggcaaggaactagggtgaggtggaaccacaaaacagagggagcttggatccctgaatgaccacatggacatacacatacaccaaagactgtcttgtaagcaagaaataaacatctactgtatggaacctttgcatggagggtctatttgttatagcagcttagcttaccctgactaatacaatccctgctctctgagaatttaaaattgcttcaaggagacaagactcactcatacaattctggaatggtagtacgtggcttcgaagaagggtgggttgtaaggtttggactttcagttctgaagtcacaagctataggcccttgggtattagactctcctattgaaggcctttttctggaaagctggaagatagactggggagaaggcccttctggaagaggacacattacaatcaagggttcaaaagtagggcttgaagcaagcatagatgagatcaacaatgttaattcctagaaaatgaaaaaggaaaatggcctttaaatacctaagagctttgactgctgcagggatgagacgaaggccagactttcataacttctctcctgtgacttcacacacctcagaagttttctggtgaggagccctgaacctgggtgtgtggggagttggtgtcagcttgctgtttctctcccatgccttttctcctggctaggaaccccacttgttgtctgttttaaccaataacttagctcagacttgaatgcttgattggaacagcaagtctccagctttctgcagaggtctttggggacaggaatatgatgaagtttctgagctgaggattctaactgagacttccagctctcagctgaacttcagacgtgttctttacagtcacagctgtgaagcttttcagggcaaggccctgaaaagctcagcttggatctgtctgtccctaccaggttctgggggaagggggaggagagcaggcagaacactcccagtttacagcccagggatgctgagtcctggggccaaaggtgttgctcatcaccctcgagccctagaagtggcaggacctcaggagaattcaaagtggtcttcctcttaggaaagataaacacttattccactggttctcctcttcctggacactccactcccttcttcccagactcacacacctcctaactgcaccccaatgaatggtgcttctctgggtcccccacagacaaacattggggagcagccactaaagacttgggttctggttccaactgctgattttgattaagggtgtgaccttggccctcttcatccccctctcttcttcccctgttcattcacagctgcttttgttaatattcatggtgcattatgtaactattgttcacagttgagccaagtagtgtactagacttgcttggttggtttcattctccttttgttttccctgaagccaataatcaactcattttcatttgcttggtgttgtttgcacagatgattaagttttcccttacctacctgcagcctgtcaagacaattttccacaagattgaacagatcagaaaatccactgggagcagtttcttcttcttcttggaggtgtcccctctgtaggcctctgacgttccagttcagttccctgtttgggcaacagcacaactatcatatgggcttttcttcacctccagcttggagaatttctttacttctctcatccattggatccactgcttcctggagccgatgcctttccctccttggtttcatcccttcttttgttggtgcacagcccccagcagctgtctgctaatgcagggatgacatctgggggttaagctagcaggacaaaggagcttctgccatttctcttctggataatcatcccccaacaaacaacaacagcagcaaataaataaaacaagaagaatgtgaaagagaaatgcaaatttcattttatacaaaataagcagacagacacaacccagtactgcaaagagtggaaaataggtgggagagagtcgaaggaccttgttctgctaggtgtctgcagcagggcagaagccgatctaccaggcagaaccccagagtagctcaggaatccaagatgccacacaaggcaaagtgaggtgtggcaggtcacaggttgcaggcctccatggggaatagctaggcccccaggttcccacccctgagcctgacaccttcccctgtccttttggaagacgggaagaggatccaggcaagggccagggtgaacacaaaccaaaacgagggggattgggggaagtttactcttgtacacagtcccccagctcttttctgtctggctcatggtccaggagcagaggtaggtcatgggtcaccttttctttatgtcctacaagaggtatgaattttaacacatgcactggttgtgtaaccagaacttcaatcaggatacagaagagttccatcccctcctgcccccgactccctcatgttaccccttttatagacaaacactccctccaccccttgcccctgggagccactgatctgttctccatcactgcaatgttgtctctttaagaatgtcacataaatggagtcatgtcatatgctaccttttgagactggcttccttcactcggcataatgcctatttatttatttatttatttatttatttatttatttattgagacagattgttgctcttgtcgcctaggctggagtgcagtggcatgatctcggctcattgcaacctccacctcctgggttcaagcgattctcctgcctcggcctcccaggtagctgagattacaggcatgcaccaccacacccggcttattttggtatttttagtagagacagggtatcaccatgttagtcaggctggtctcaaactcctgacctcaggtgatccaactgcctcagcctcccaaagtgctgggattacaggcgtgagccaacgtacctgcccaatgcctttgagactcatccaaattatttcacgtattaggaatttatttttccttatttctgagtagtgtttcattgtaaggatgtaccacagtgtgtttatccatccaccccttgaacgacattttgggttgtttctagttttgacagttatgaagactattgctacaaacatttgcatacagggttttgtgtaaaaacagatttttatttcactggagtaaacacccaaaggtgggattactgggtcctatggaaagtgtatgtctaatcttataggaagctaccaaacattttttcagagtggctgtactgatttttattcccaccagcaatatataagagtcttgttgttagacatgtttgccaacacttggtattgacagtatttttttaaaaaatgttatcattttaataggtatatagtggtatctcactatgacttcaagttgcatttccctaacagctaattatgttgcacatttttatgtccttatttgccattcttacatctttttggtgagtgtctcttcaagtcttttgctcattttaaaaattgagttgttagtatacttactgttgaggcctgcgtgttctttacacattaaatattcaagttcttttaaaaaaaaaatacaggggccttttgtattccctaaactggaatgcagtggcatgatcatagtttactgtagccttgaactcctgggatcgagggatcctcccacctcagccttccaactagctgggactacaggtgcatgccatcaggcccagctaatttttattttattttttgtagaggaggggacttgctttgttgctcaggctggtcctaaactgctgccctcaagcaatcctccttccttggccttccgaaggcatgagaattacaggcatgagccactgtgcctggcccataaagatgcaagttctttgatgaataggttacttactattttttttgtcccaatctatagcttctggtttcattcctttaattgtcttatatagagcaaaagatgtttttgttgttgttgttttgtttgtttgtttggcagagccttgcactgtcacccaggctggaatgcagtggcataatctcagctcactgcagcctctgtctcccaggttcaagcgattctcctgcctcagcctcctgagtagctgggatgacaggcgcctgccaccacgcctggctagttttttgtatttttagtagagatggggtttcaatcagttggccaggctggtcttgaactcctagccttgttatccgcctgcctcggccacccaaagtgctgggattacaggcgtgagccaccgcgcccagcctagagcaaaagattttgattgtgatcatggacgccatcttcaaactgattcccgtctccattaatgtgcatttattgagcacctgtagtatacaggtccctgttgggggttgagctttacaagactgatggaacctggtgctcagagcatcctctaagatctttgcccttccccaggggaggaggtgctggtttagacccatagccctgagggaagttcgggacttacttaggtttttcaaccccaactatcctcagcttcaaaccaatgccaccgaattaccccctgagcattcctgtcttacccaccctcctttgcctaagccttgttttccttcactcaagcattgatctcctccttccttcctgggttaaccttgcctacaattcaaagctcagctgggataatccatcaggcctgaaagcttctccaacccaaagtttctatctctctgtctatggccttgtttgattatatcatcttttcttcccacctggtagggttttggggattaaataatatgaagcatatagacatgtgcagcaaaaagcctattagaaagtagattttccatgcaagttgctacaaaatcaaataagttcccagttcctgagaacccaaggtttgatatggtttgcctgtgtctccacccaaatctcatcttgagttgtagttcccacaattcccatgtgtcatgggaaggacccaatgggcataggtcttttctgtgctgttctcatggtagtgaatctttctcaggagatctgatggtcttacaaaggggagtccccctgcacacactctctttcctgctgccacgtaagacatgcctttgctcctccttgccttccactatgattgtgaggcctccccagccttctgccactgtgagtccattaaactttttcctttgtaaattacccagtctccagtatgtttttatcagcagcatgaaaatggactaatacaaagttccctctaattctatgttagaagcctgttttagaagggcttccacgattattttaatgagagcaaactggttcatgagtacaccgggcaacacacgggcactttcacaggaaagttaagagcatcttccgccaaaggagagccagaggccagtcaggaaaaggaaggatttcttaataataggaggtctttcgctattccagtgtcctgccgcaaaatgatagtacagacctggctgctagtcccctagagtgcccagtgcttccttttctagaactgagacaaataaaaagtaaactccagttctggagtcctgttttgcaggccccgttcccaaatgtcagctcctaatgggcaacagctgcctctgtggtttcttctaggcaagtgattcatgtctttgctcagaaacgataagcagaacaaatgtttgcttagacatataacagagggacaattggaaaacaggagactggcaactggaaatagtttgcagctatttgatccatgataattagtctgaattagtcatatggtgctcactggccaggcctttgggccagaggcagcgtgggggaatagacagctggtcttcctggaaaagaagtgcagaagggaacatagcagacacagaggtttgctcagaacacgtcagattggctcttgccctctcaaaggtgacccgtcttgaccatctgccttagttgcactccataccggatccgggtccccagcctggaaatgagtggagaggcagaaactacacacccatgggagatgcctctaaaatccattaacaattttttacacactcagaagttaaagtaaacaataggttgaattttgtgtgtgtgcaggtgggaaaaagcttcaaaaatatccagacacccacattcattggattttaatcttagggatcatgttaggtatactgactcatttaagagatatatggaccttgaatttggaacctaaaagtgggactttgagtggaattttcagtctgattatgttgatataatttaagatcttgtagcctacattatacttatacagaatgtactcctgtggtcatgctccaatacattatttagcagatctatcataaatatttttctttctgtgagaaaaggtttcactctgtcccccaggctggagtgcaatggcacaatcatggctgactacagcctcaacctcctgggctcaagcaatcctcccacctcagtctcccgagtagctgggtctacaggtgccctccacgaccacgcccagctaatttttttttttttttttttttttttttttttgtagatactgggtttcgacatgttgcccaggctcgttatcatgaatatttctatgagaagggagaaaagtcagatacattcaatatttcagccaaaaaaaagaaaagctacatttttgtcaaaaacttctcagaccattttttgcagagtcaggaggaaaaacaaaaagtgaagcccacaaacccgaccccctcctcacctcagattagaatctgtaatattggaggcctctgggagtagaatttaagtcactaggaaggtggacacatcggcaaagccagcccggagctgagtagggcatcgactgctttaccagcaaacatgaacgaagctaattttgagcacgggatattgaaaaactcaaccctcacgtctcaggtggatttttctttttctttttctttttttttttttttttgagaaagagtctcgctctgtcgcccaggctggagtgcagtggcacaatctcggctcactgcaaactctgcctcccgggttcacgccattctcctgcctcagcctcccgagtagctgggactacaggcgcccgccaccacgccctgctaattttttgtttttttagtagagacggggtttcaggtgttagcctggttgttagccaggatggtctcaatctcctggcctcgtgatccacccgcctcggcctcccaaagtgctgggattccaggcgtgagccaccgcgcccggccccgaatttttctaaatacatgataagaggttgtaaatggggtgacctgctcctccctccttgcccacgagcagttccaatggggtgtctctctgcttggggctgaagcagatgtggctgcgggaggggaggtaggaaggtaggaacaggagcctgcaagagagtggtcttccttattgacgcagacgactgttggtttcaatgttcccagcctccctttcctccttcttctgttaacaacaccttggattttctctgagaaaagcacttttcccatattctcagtccctggtgcttggatgggattagaaagggctcttcctcctgcctcccctgcacccccattccagggagaacctggggtccagctcggtcagccagcatcctccagccaccaaggctggcaccagaagggctgctgaatattggatgcaggacttgggcctcatctccagcgatgcaaagcagctttctcccgtggttgctgagaggaggctgcggtcctggggtggtccatgggccctggtttcctccacgtccagccctgctgtaacagttctcacgacacagccgaagcctctggacccattgtgctggacctaccctgagaaggctcagttgactctgtgcctaatctagtttgatacttttgtctggttgtttgctcttaccccttgcaaaagacagtgtcatcacatgcactcatcttggccaaaggcggtgcgggaggaaaggcatggagatgacgccagaatttaggttccactttttgacactgagacctcccaaggggaaccgcaggctctcagtgcggaagccccctccatagctcccctgacctgtccagcacctgcctccagaggtgaggaggggctgtgcaagttcctaaaggcagccaccatggacaggtctcaccagtcccaagtccttcctctaggcccccatccacctccttggactggcagcagtgggtctcagctctcaggccccagaagccacactgggagtcctctgttcactgagaggcagcctgaaccacggaaaggagagacctgggtctctccagctaaatacccccattccctcctgctgtgcccatggctgtggcaccagggcctcctgccagcaggaccaccatgccctctgtgtcctctgaacacctccactcagagctgactcagttcagcaaaggcggagcatgaacttgtgaggagagacactaagcaggctggagtagctgaaacatcactttccactgctccctgggaaacggccagaaagattcctgccaggcccggaatccctgcatgcacttgatccccaagacctcaggaccctcttgccctccctctctgcacgacatttgctcttctctctggaaccctctacccttgggcatctcggagttggcttctgcttatgctgtttttcggatctcagcttgaaggatacttccttaaggatgactttcctgcccacacccaggccaggccactctgttgcaagattttgcacacttattcattcatgtatttagtattttggggcgtttgttgtttttgaacagcacttgcttattcttcctgactggatgtcacctatggccccagctgacatttctgtgtctgtctgtcactctgcgggtgtctgtctgtcactccgtgggctgtgttaaggacagtcttgtactgcactgtgttctcagcatccagcatatccacgtgggctcacagtgaacaaatgaatgcatttgtctgatggttctttttgttctgttttgttttgttttgagacagagccttactctgtcgcccaggctggagtgcagtggcataatctcagcatactacaacctctgcctcctgggttcaagtgattctcatgcctgagcctcccaagtagctgggattacaggtgtgcatcaccatgcctgaataattattgtatttttagtaaagacagcgtttcaccatgttggccaggctggtctcaaactcctggcgtcaagtgatctgcccaccttggcttcccaatgtgctgggattacaggctggagccactacacccgtgcagtctgatagttcttatatgcacttcttactctcatagtgtttttaaacaatttttaattgatgcctaatagatgttcatagttcttccatgacttaagctaaatcttgctcttcctggcctcagatatgtggccaagactcacatcctcctaaaagccattcccaaatgacttcaaaaaaaaaataggaggaggaattcaggaacaatccataacaggcaccacagtgaaacgccaggtgcagcaactctggcagaggaagggctggtctgggaaggtgcagtgctagggcgggtcccagaattgctaagctctgtgtccttggagagagggacaggggatggtgacagcttcaggccctcttacaaccgagatgattgcccctggccccaggattttggccgccttcaggagcagttggtgctgcagtacgtgctgcctcgggttgggtactgtgagctgccatcaccctgatgcctccatgggctgagcagaagacacgccgatgtgttttgattcatagcaggcgaggctatgtacattttaccaagaagcctgaatgtaaaatggacggatgttactatcagacacaacagggggcctacaagtttctaagtgcctgtgctgtaagtctgtcttgaacatatagcccagtttagcaatggagctggtgtgaacagctgtgtgtgtgtgtgcatgcacacatgcacctgtctcttgcacactgtctcttggctatggctacaaccatcccccaaggatgagataggagctagcggatggagcacctgggggctgggccagagcacacctgcaggtcctcagcctcacaggagtaatttctgtgggtctttctgctgcctaagttgaggatctacttgctggccactcatgcctgtccagcttttaaaacaatatttgtttacctttttctaagtatataaagtaatacatattcatagtagaaaatgtagaaaatttaaaaatgtttaagaataatatcatctgtaatccctctactcagagaaaatatattggtgcatttacacccagtttttcattaataaatattttgtaacaaaatttttgtgacctagttagtatgaccttattatttatttacttctgtatcttgcttaacaatatatcaagaacagtttcatatcattactgttccctggaaataactttttactggctgcatagtattccatcatttggatatattactatttatttaacccattctccaccttggaacatttaagttgtctcaattatcttgcagtagacagtagatgtaagtgaatgctcttatatacaggtttttgtgagtttctgattgtttcttaggaaaaccttaagacctttgttggaccaactggggaagaatttctttcctgctcaggctgctcagctgatagagtgctggcctggagcagctgaaagacactttgctgctttctggagaatgaagccactgggaaaccacataggagggaagagagagacagcttctcgatgatgtcatctgaacacctggatcctgctgtgcctggacttgcagtcccattgtctaccaatatagttcattgaattcaacttcagctggatgtcattcatctgcttccagaacttgtgtctaatgcagagctgaatgcatactctcagagttggaagtggatgcaatccacaaatctagcacccaaatttcttttttctgttcttttttttttttaatttgagatggagtcttgctctgtcacccaggctgaagtgtagtggcgcaatctcagctcactgcaacctctgcctcccagattcaagcgatccttctgcctcagcctcccgagtagctggaattacaggcgtgtgccaccacggctggcctaattttggtatttttagtagagatggggtttcaccatgttggccaggctgatatcgaactcctggcctcaagtgatctaccccccttggcctcccaaagtgctgggattacaggtgtgaaccaccatgcccggcctcaaattgcttttacagaggcaagtggccaccgagtctgtgattgggatcctcctgtggagacctgtggagactcgtggctcactacctttgaaggcagtgttagggtaatctctccacatttccctgctgaaagctctgagtgttagtaaattccttctcatattagctaaaatgtattttcctgtgccttttattcactgatggggaatacaagcattctttttgagggtggccaatgctagtaattccctccatacagtcagtgatggatagagttaacccatggttgctgcatgtagtactgtcacttgctgtaccaccaggactcaagttgatgctcaacgcaacattcttttgcagggcccttgtcctcagtttcccttcttttggggtgggctgagagagacagcttattcagcatgaagctgtagtatctacagtttagcaaatgtctgcggagcctttaaagcagtttttatcataataaaaatattttaacttataaccccagaaagagataggcatgggagtctttatacagcacagaaatccagatgagcataatttgaaagtcatttgaattgtaatgagtatttttaatgtaaacaggcaggaggaaaaacttgctgggttctcttgtagcacagacacccagatatatgtcttttgatagtgatattaaagtgtcaagggtgcataggaggctgcagatgtcagcggcatgaatgggcaaggcaatttctgtggttgcaggctggaggttccagcaggaatagaaaggcaatctctgtgctagatggcccagggtcactgcaagtctagctcctaaatgaaaatcagggacaagatgtggcctgtaaccacagtcactgctcttcgtaaggctggtggaaaggtgaactggaaaggtttttagggttagggagatacaggaactcccaaacatcaggcacctgatagcactctccacctaacatctgcatttatattgacctaatgcatctgttcaatttgtctcattctttgtgctcacacacatttatttgaaacaaaactttccatcattactataggtgaaaatccttgatcacttgccttgaatacaagaaaccattattaaatgcaagctagataattttgcttgtcttacagccatgagccttaagtctgttccccccacccccccccccccccgccttttttttttgttaaaaagatgagcaaaatgtgagaatgatgcaaaagagatcctggtaccaaaagaagccttctaactggatatcatcagagggacagaaagaattaaagtatggacaaatttctcaaagtggtattactgttatttaattagttgtccatgtgctacctaaaacctttcaactacatcttttatgaagtatcccatatggacagagtcaaattccctcatttaacagatggaaagtttgagggccagagaggggaaggggccctgctgaggttccaacagctttctgatgccttgttccatgctttgccttatttctgctgtccacctcatcagctcttaagtgaatgttgtggtccctaattgtgggattgcagtgtgtccagtcagggcagcctcttcactttcctggaggaaaaggcagtgtgatctctcactgggtgatctctcactagggtgatctctctgcatagggcacccaggctggaaactagcagggagctggccagcacacccagcaggtgccaggctgcagggagctcctgcttcatctcaaacacaagaacactcagctcaaagcacaatattttctggcttagagtttggctcttagagtggcagctgttcctaccaaagcaaacattgaaaatctgtaattttcagaaataatcgccaaccctcaaaaaagatgtgtttacaccaaaactcctccgtgtgttcaccctgcattcactcagtgtcgagttgcagttttctctgcacttcatcgctctgcttcctcctgaacaattgcttttgccagggagcatcagcacagacaactagatcctgagcaatgaccagctgggctcctccccaaatggagccagataattttgtgttaccacttctgcatttttttcaaatcacatctatgcttaagcagagagcaaactctcaactccagcggccagcctatgggaagctataaaccttcattagttcagcttcaggtgtcttcatcagcctctcccgtaggtggccttgcaacctgatcttggtttcaaaattaaaaatgcagcttccttggccttctctggactcacagagcctacagttggagacttatgcactctacattttaaaatgggactcacaagcctgtgcacttgaggcccatgggtggatggcattgcctggctgggaaatgtcaatttcccaactgggcatccatccatccaccagccaagtggccagtggatctttgttgagcagttcctgtttgccgagccttgtgtagatctctgctgcgagggaggaggaggtccccaccttaaggagcttttaaggcttgttgggaaggcaaggcatatatctgaaaagccccattgcatgcaagttaactaacgatacaggatgatgccatgagacctctgccatccacgtaccagaacctgctctgctgatttcctggctcgatgtccatttgctgctggctcatgctcatattcacaagtcactcttgagagtcctttccctgtgccagaccccgtgctgagtttcagacacgcagggatggacagcacacagccttggccctccaggcgcttgcatccgactgtggagagccactcttagaaacccagggagcaatccaagtctgtgtgtgacgccactcctggacctggggaacacagagcccctgccagtgccctgggagctggtattcttgcagggttggagacagacctgtcttttgtggcctgttagtttccttgtggctgttgcaccaatgaccacaaacatggagacttaaaattacagacatttgtgctctcacagttctggagaccaggagactgaactcagcatcactgggcccacatcgaagtgtggcatggccctgcttcctcagggggctcccagggagaatccgttccttgcctcctctggcttctgctggctccggtgttcctgggcttgtggctgtatcactccagcttcagtgccagcaccttcaaatttctccgtgctgaattttcacatagacttgccctctgtctgtgtcaagcctccctctgccttcctcccttaaggtcacttgtcactgcgtttaggtcccaccaggataatctttgcatctcaagattctgttcttaatcacatcaacagagacccccttttcctcataaagcgacaaccacaggttccagtggctgggacctaatgtttcggggagcactgtgctgcctgtcacatgtggtttcctagatcatcaggcccaggctggccttttggatgtggccttaagtattcacgccacagaggctcattctcttgtccctgttctaccactttttagccaacttccccaggacacgtgtccttcctggtaaggaagcgcttggggtcacagatcagcctgcggctttgtggcctcctgggagacaggcccagcccggcccacctcctcctgtcgcctggaggtttctgagagctcatcgtcactttctcgtccctcagtgtgaatgcctaatcattcattgaaggcctgagttctgtgaacagaaagcaggttacgagtcagatccatggctggggtcagtgaggaaatacaaaggagattagggggacaaagaggggacagggcaggcagaactctggtaaggcaagcaggccaccctggcctcagccctcctggagcacggctctgctctgtgtgagacctgagaggggcacggggcccgtgtgcacctgtagctctccccactctgtattccgggggattcaggggattcgtaccacgcctgccagtggaagctctggtttttcgttttttttttgtttgtttgttttgtttttttgctttgttttgtttttaagagacaaggtctcactctgttgtccaggcatgatcaccactcactgcagcctctatctcctggactcaagcaatcctcaccttcagcctcccgaatcgctggaacacagatgcacaccatcacacccagctagtttttaaatttttttgtagaaatagggtctcactagattacccaggctggtctcaaactcctggccttaagcaatcttcttgccttggcctcccaaagtgctggtattacaggcatgagccacctggccaaaattctactttcaaaacaagcaaaccaaaggacctcatgctgaggccctgattctcactgaggcggttgcatcaatacaatgattctgatcctcacagcatctcaggggaggctccctgccctccagaggttggcctctgatggccatttcacagatgaagagactgaggatccgagagaataagcaacctaactgaggacacagaaagggagaaaaatggccaagtggccagggtgtggaagccaggcctggggattctctgccatgaaacattggctgtcatgactgagctcctagcctgtgaggacttgcatgtatgcacggcctggttgtgcatagaagggagagaaaggccggccgttagtctttctggacttctcaggctttggcctcctccgagaccctggggggctgccctttctgccttgtattcccccaaagtctctgcttcctaacaacagagtttgccttcttgcttaagacccagtgagcaggcttctgttcttgcagccaaaggagctttggtcccagcagtggtggtggctggggcagcgcagcctcctgcatgggcttggtggagtcccggggcccctgtgtgcaaggtccatgctcctccagctcccagaggcccagcaggggccagggctgggtcttgctgaccctgaggttaaagctaccactatcgctagggagagctctctgtgggctttcacaccccagaagtcccaggatacaagtctcctgaggagggcctctgggagagtcctgctggggacatggatccctgtgcggggggtattttatagatatgcaggatgctgaagtttcaatccaagccttttcacttcatcgccaaccaccctgctctctttagtaccagcaacatcatcaagtcaccgcagagaagcaagtacccctgggcagccttgacccccacccagagagactcaccaggttacagaggctggaatctgatggggtgatggttgttggttggggtttctcaggtttaaggagaggattttccctacccataccccccaccccattgccattctcaagaactcatcccagttgcccggaagaacatcccaggctgagttatgttgtgtgaccttctcaccagtctttgcagattagaagtagggtggacatctgagccaagccatgccagtgttctgtttgtggaggatttggagttaaggcggggaggccctgggagccagcctcctgtcttcaaggtgccagtgacttagaggccatgggtttcttccttttgtcctaaaaacatagagagggctgatgcagaggagaaccacaggagccgagggagaagagatgccaccttggggctcctcgtgttcccaggtacaggctgtacgtctggaaggcagggccctccttcctgccttgggtttccccaaaagtctctgcctcctaacaaggtttacttccttccttaagaaccaatgagcaggcctctgttcctagctgccaaagggcatctggccacagcagcaggagctgtgcagccccatgcgtgggcttggaggcctcacacagcttctgcatggagggcgaggggctcctccagctccctgaggcccagcagggcctggggctgggtcttgctgaccctgagggtaaagtcaccccagtcatgaggggaagggctctgtgggcttcctgaaggacatacgctttggaggtagagcagggtggcctatggggagagggaaggaacagggccacaagttgtcccagaacatttggctgttagagggagtgtatcagggcaggaagggagatggccctggcgccggcagctctggttagcttcctctgcatgtcacatgtccacatctccagagttcctgcaaggacaacaacagtgccatttaagtgaggaacctgaggtttagaggacatatttccttcccagggctgccgtcagagaacagtaactggttgggggagaggtgggggcttaagacaagagacatttattctcccactattctggaggccagaagcctgaaatcaaaatgtccacagggctctgcgccctccaaaggccctaggaagaggccttccttaccttttctggtggctccaggtgttcctgggcttgtggctgcctcgctccagtctctgcctgtgtattcatgtcgtctttcctcttatctcttggtcttctcttccatctcttaaaagagcgcttgtccttggatttgggcccacctggataatccagcatgatctcatctctagatccttaacttaattccgtctacagagaccccttttccaaataaggacacattcacagatgctgagggtggcaggtggacatgctattttggggcctcatttaactttctgcagataggctggctgattttccactgtcacgcagcagtaaatatctgagcgaggtctggaaccagcccagtctgactgccatgatatttgctggatacaacatgaagatatgggaggagagggagaaaggccagggcagaaagtgcctcccaacactttcagtatttcctgcactctctgggaaaacataggtatgatgatatttattctagatcaatggctgttagagaaaagccagggtgggaggccctgggacggccttcactcctgggtccctgtgctcccacatatgttcctacatgaaccatggcctccctctcagaagatgccctcagatcccatgggtgcattgctagcaacatccacaggcaccgggatcttgagcactggagcggccccaaaggggaaggtgttggttggtccaggaggagagcactctccagggaggtgaagggccagaagcagaatggagcagaattccttctactcaggctgggctgcaaggagaggcactgcccagggaggccgatagtgaaacctggtgctacctggcagtcagtctgcaaaagggaggaggctgtggagaaccctgtccccctacctacatttctgtcaccccagaattgttcatgcagtgctttgacactgccagcacctctgacctctgaccctctgtagaatccaaatgcggaactttatcagggatccatgcccacccccagcacacacacacacacacacaacacacacacacacacacacacacgtttttgtgggatgagtctgagaggaccctccagggctgtccacgtttcccactccagccctccttcctttaccttcacacttggcctcccgacttactctcaacccacctccttggtgtgcaaactaacaaaatgcacttttctgcccaaactcccctacatcattaagtgacatagaaagttcagttcaatacgggggaaaattgaatttatcttggaaatgttttattcttccaaaatttcactttggcaaagtctaatgcatagaaaagcatgaaatactacagctccagaccaagcaagttgttccactaagcattaagccgcagggtccgaattctgcctctctcccgtcaaccactctctttaactcaaatgcccatcaacgtcccggctaaatgtgagttttccacggatcgcatcttatcataatgtcacaaaacccatagaattacaaatcaggtttaaggcagaaaacatgacaggcaaatataagtacacaaaaagtacattaaggatccatcttcatttattctccgcattccaacctacctctccgcgcagacccgctccgtgcggcgctcagcttgaagtagcctcagatccattttaaagtggactgaaatataaatgacagttcacactgcacatgaacatagacaactgtataaaatatttaaataaagacaagaaagaacagaggattgcagcaaagcctttggcagaaccggccttggggaatttagcagcttgagattcattacaaatatcatctttaatgttatttttagttcaatattttgtagcactcagaagtaaatcttggtgcgctgtctcctctcccctgcctttctctccttgggtgtctgatccttcagttgtactgaaacctaatacgttttcaataaaattgatttgtgacgtcgtaatgctgtttgtttaccatctcccattccttgttgtaatgggagagaactattgcatcatttggcaaagtgaggaggattgctcttgattgctgaataaattgacatgaacctggaaacaaccctgttgcaatgtgaaaatgctccattgagccttccctccctcctgcactctcccattttgaagttctcgcctggtattccagtcctgagtgctaagggatcatctgtcctcccgaaagagagccattgtcccaaatatggatgcagaagagagagaaaacttggttttaaataattgctctttggtttctttctcagtgtgactcttcatctctagctagtttgccacctcaggaggaaattctaaaaaatggcatttgtccccaggtgaggggtaggagaggaccagttgactagaagccctgttctggggtcattttgcaaattcttcagtcttccaggggaactgcagggagagttaaacaaagctctgtccaggaggcagctggcaagatggaaaggaaggcagaaaacattgccttgctgctcggccagctcctggggtgtatgagtggaagcccttgaggaaaggacagaccctagtggtttttgacagagcagagctggggtttcacgtttgtcactccagggcaggctttgactcctggcccagggaagtgaggggctggggagagaggctcagacgggagctcagagcagcctgggaaagggatttttcaacccagatattaatgggcccatgatgtttcctagatggagccctcaagggcaagccaccctctctgtgacttggtttcttcacatcaaaaatgagtctgatgccctttgcccttgactttagtaggatttctgaggaagaaggaaaaaaaaattctcttttagtattgaagttatgtttacatatgtaaaagcaaagggagagaactcaggtggtgatttgggtaatttataactaaataaagcctaatagtgttttgtttatttattcgtttgatttttagagacagagtctcactctgttgcccaggctggagtgcagtggtgcattcatggctcactgcagcctccatgtctctgggctcaagcaatcctcccgcctcagcctcctaggtagctgggactataggcatgcaccacagtgcccagctaatttttatatttttctgtagagacagggtctcattacattgcttaggctggtctcaaacttctggtctcaaacaaccctcctgtgcctcccaaagcactgggattataggcgtgagccagtgcacttggccaagcctaatcattttaaaaacaaagatagttagatatttcaactatggaacaaaaaaatacccaacggttgttgtagttagatttttgttgttttgtttcttatttatcaagagaactacttcaccagatattgtgttgatgtggcccaaggttaacaggaaaaatcagaaggactcaggtatctgagaacatgagtaccccacgcagccaggatgctgccagtctaggaaactgaggtgctggccaggggagagccaggcttatagaattcagaaccggttctgggtggcctttggaatgtattgtgatatggtttggctgtgtccccacccaaatctcatcttgaatcttagctcccacaattcccatgtgttgtgggagggacccagggagaggtaatttcatcatgggggccggtctttcccatgctattctcatgatagtgaataagtctcacgagatctgatggttttatcaggggtttccacttttgctttttcctcattttctcttgccactaccatgtgagaaatgccttttgcctcccgccatgattctgaggcctccccagccatgtggaactgtaagtccaattaaacctctttttcttcccagtctcaggtatatctttatcagcagcatgaaaacagactaaacaataaattggtaccagtatattggggtgttgctgaaaagatacccaaaaatgtggaaatgggtaacaggcagagactggaacagtttgaagggctgagaagaagacaagaaaatgtgggaaagtttggaacttcctagagacttgttgaatggctttgcccaaaatgctgatatggacaataaaatccaggctgaggtggtctcagctggagatgaggaacttgttgggaactggatcaagggtgactcttgatatgttttcacaaagagactggtgacattttgcccctgccctagagatttgtgacactttgaattaagagaaatgatttagggtttttgccaaagtaatgactattacttttgcaccaacctaatagcagaagtcaggtgcatggactgcagcctgctaaaggctatctggttggcacaccatcagctacaggcagcaggactttgcaagtgaaatctctttctaccatttctctaccaatcttcaatctgcattctggaccgcaaagacaagaaagctcactgtgccacagtccgttttgagcatatcagaggataagcatgctacataataatgggtcaggcagaaggaaaagctgacttcttgcagctcacatcgtaggagaggaaagggtcaagttcagagcagcagaggcactgtttttgccttttttcccgtgacatgacaccattccacttaagtagctgctgtcagattcaatgagaaaatacgtgtaaagcattttacacactgtctggcacatactaaccactcaataaatgttagcttgttattattatcattttcctaaatggagaggtcaaaccaattagctgagattttctttttaatgaaaactctgatgagttaatcattgtgaggtagggaggctttgaaacccctgttaactgggatgattaaaacatacttgattaagctgaggcagtgacagcatatagattttcttacaggccaactccaaccgagtcatggtggtggccactattgttaagaagggttctgaggctgaacaaggcttaggacgagggagttttcagatgaattagtcacatgtgccttgcacaccagagatatgtgggcaggggtgatacatgacattcctgtcctttggaataatcagaattcatggcttttattaatcatagagcttcaagaaaacagattagaaaggctgcttagctccataagctgcaaatgttagaacagaggtaagatgagaaagaagtttccagaatgtgccaaaggtaaatatgcttcttcaacgttgtctggattttcccaagaagaaaaaggaggagaatggtgatgagaagaagatggagaaggagaaaatcctttaagatatgacttacagaggcattataaactgaaaggatcagcgtctagaatgtgtgcgtgtgtgcgtgaacacagaaaaccataaacaaataagaaaaagacaaacacctaatagaaagacaggtcaaggctaagacttcttagagaaaagccaatgatcaataaataaaagctgctcgatttcaccagtggtccatgctgtgtgaactaaaacagcattctatggctccaaattggcaaaacttttgaatctgacagtataaaggattgggaggatgtgagaactgggtaggggtgcacacaactcacaagcccttaggacagcaagttggcaacctctagcacagctataaacgtgccaatcttctgctgttccagcatttccacactaggtgtgtactctcagaaaacgacagtcaatgagtcccatggaaggatgcttcccatagtatggtgcagtaaacatcaaaagccaaaactagccagacagccccacaacagggaaatggtgcatagcgaccagacacaagatgtatggtttacctctgagtaatagagaagtgtccacgtcatgtttatgtagagaacaagtatggcacggaggacagtccctcgtcttctaccaatgccgtacgttttccatctaaatacaaagaacatgtcctgaaggccacacacccacagataattatgataatacagaatatatggcggattgggatgggagagggtcagagaggactttactcttatctgtaatgttttaatattttataacaataatgtgttcatgtattctttgagtaattaaaagttaatggctcatgcctataatcccagcactttgggaggccaaggtgggcagatcacttgaggtcaggagtttgagatcagcctgatcaacacggtgaaaccccgtctctactaaaaatacaaaaattagccgggcatgcctgtaatcccagctattagggaggctgaggcaggagaatcacttgaacccgggaggcagaggttgcagtgggccaagagcacgccactgtactccagcctgggtaacagagcaaggttctgtctcaaaaaaaaaaaaaaaagttaatttaaaaagagcctcgactcctggatttacagagcacaggcaggcggctgggggtggtcagctggatgcacgtggcgatggcaatgtctctgcgtccacagcagcctctggcccttttccttggctgttactggccatgttcatgactgagctcctttgaaatgtgttcactggggaagagcagtctcctgtttcctgttgctactgcttgaaatcatgatttcagagcccaggctgtaggatgggcagctgcctcttccctaggtgggaacagaatactggcccagcctcttgaagtctccttgcaggttcctaccctcttggtactttagaggggaccctgagaagcagaagacatctttttattcctggaagcccctgctctccttgtccatggtgctggagggtgaatatctccaaatcagcacctccatggcaccacgtgtgggtgaccaacaactgctcacaaaggtttcttccccaacctctgggggaactccaggcagggagacctgtggaaatacctcagaggatattcctgtaatatggactgcttggacctcttagaccctccccacttgctcttgcattcaccaacccagcctcctcacggccagccagtcctcttcctggcctctcttccaggcccagctctgtgccagcgcctgggggaggctccattctcttaccctcctgcatgctttgttttactcccactggccaggagccttctggacctccttgagaagcagtctcaggccagctcaggctggggttggggagatgggctatggttgtttcctgatatgatttggaacttttgttctctccaaatcttatgtaaagaagtggcctcccatgttggaagtggggcctaccgggaggtgtctgagtcatgggggcagaaccctgatgggtgtctgggtgccatcctcaccataatgagggagttctcactccgagttcacaggggagcttgtttgaaagagcctggtacctcctcccctctctcttgttcccactctcgccatgagacacactggctcccctccctactctgccatgattggaagcttcccgaggtgtctccagaagccaatgtcagccccatgcaggttctgtacagcctgctgaaccgtgagccaagtaagcctcttctctttataaattacccagtctcaggcattcctttatagcgatgcaaacagatgaacacgtttcccctattctttttgactttctatgaccttcccggtgtccaccgccccttgtctaaacctatgctgtcgttacctgtgcggtgctgagtccccaatcaggccttctcatcaccagcaaccagcattgcctcttgaacccatctttccctgcacagcagcctggaggcactgcttccagggagaagtgctaaacacagagtgcccttgttattgttgttaatggtgaaatactcactgagggcctgggatagaggaggatcaagaccaactccggtatgcacatctttacctgctgtgctgctcagcaccttagggccaggaagggaactcagaggtgggtctggtccacagagccagggtgcttgggctgcagccttgcacagatgagactgctctctggttcaggaagcaccagcagctccgagtcaggtcgtctgggttcagttctgggcttggccacttagaatctggtgctgacagagtggctgtccctcatagctgaggctgaactctggtctgtttcgtcttgtgtgtggggcatataattattcctttcttacctgtctcctggctggagggtgaagttgtcatgcacgagaaagggcatttggaaggcccatgtttacaaggtcccttggtcctgggcagggacgttcttctgtagccttcgatccaggctcattcatcagtcacctgattggcacagatttattgagaacccatttgccaagtattcttctagactggaggaatgcagagaaaagcacagtccagccctcctgttattttcagtctagcaggaggggagggaaatagaaatggaagtgcacagagtggcaggtgctattaggggctgaaacaaaaggtgctctgggcacaccgtaggtcatgcggcccggggagatccccctcagctgacttcatctatgtcagagtgaacagcatggacgaaagcaccgaagtgtgagggagtatggtgccttcttcttcaaaaaggcacatttcagagtggctgatgtttgctaagggaatgaagttcaaggacaagctgtgcaggggagcaaatacaatttgaggcagttgatgccatccacatctccacagcactcacagggctcatctgtggaccaatttctactgcaagttcctccaaccctgcaggacaggcagctcagaagtgctagggagttaacatccccaggagcatccatcccgcattgggtgggaccgctctgtgtcccattctgcactgcatccccaggggtctcagcagatctgagctccagttacccctagcagcaagctgctcacaaacccatctggctttcttctcttccctgtctcacttccttgctcccccatggacatttgctgccattgccccccaaataaactactcaaagaagccagtgcctgcgagcccaaatctgaaacaagccagactgtgaaaaacctggttttgcctcaatactcactctgtatgagatccaatgggctgtcccattcagaagaagtttctgcatttctgtctgtttctgctgttcctgctacccagtcaacagagcacatgtcagcctccttccagccctgggacagccctgcccctcccttaccttgtcccagtctccccatcacacccacaccccttgtttaccaaatgttcgatcttggttatgttactataaaaatcaagcagctggcaattccagcttgattaccaggtctccagttttgattagtaaattactgtggtaatcaaggttaattctcgctgcagcgctcagcaatggattttatatttttcagggaaatggttttcctgcctgggatggagaacatttcattaaaggaacccaaagataggaaagaaaggaagtgagtcctggaagtatggagaatgggcacctgcaggtctcctctctctgtcctaccttccagtcggcccttggctggggtcaaggagccaggacaggacagggcctcctgagaaatactagtccaccacttctggcttttggagtgccattgagagaccagggaaaaactcttcttgctggaactgaaagccactgagctcaggtcagaaatcctagctgctggggggtaaaggggtcagtgctcaagatcagagatgtctttgggtgattgatatctttaagtgcttcagggggatgtgaaggaaagtaggctctgtcagtgcttgtgtgcgggcagcctctagactctagactccccgccctacgggatgtcactttctccagggaatgaatggcatctatggaaggggtcaggagttcggagagacacccaggcttgcaagagagctcttgggatggtggaaccttgcagctggatttcatttctgatttttgtcctgggtctagtatatggactgtggaccccagacaagttggaattaaggtgttctgacctacagatagagataggacaagagagaatgggggctggccccagcccacccaggatttctctgtgagctaatcccaccacctgtaactccctatattgccatcaataaatgtcagcaatgaatgctttgcctctagaaggtgagatttgtttttagtatctctttgggggatggacactgtcagtccatagaatttatatcaaacttttttagcagcaaagatgtgtggcagtgaaggttatggtcagtgcagaggtgctcccacctcatcccactctgagtcaaaggaagctcacaggttgctctgctgccaaccccaccctctatctgtccttctctcctacacatccataatcgccctctggaccagagcacgcagctggtcctaacttcacctggatgtaaagatgaagcgagtcgtcctgcaggctccacccttcactctgctccatacagtaggaactggtgtgcacatggtgtagactctgttctggggagtctcaccccagaaccgccaagcaggaagaacagatgattaaaacccagacctggcctttgacttggtcatcttgttttctgggggtctcaggaagagactgccttcttggtgtctccccttcccagattactgtctccaatttcaggagtccccaaagcttattagcacctttacaaagtgggtgtgggtgaggtggagtctggactgggaagacctggagctagcactcctgtctggaggtgagattgatatgtcctcattctcagtgcccctgtggggccatgcctctaggaacagatgtttgctcaggggaaggacaacatgtgtccaaacctcatttcaaatatgttttgtgctgggtatggtggctcatacctgtaatctcagtactttgggagtccgaggctggtggactgcctgaggtcaggagttcgagactagtctggccaacatggtgaaaccccgtttctactaaaaatacaaaaaattagcaggatgtggtgggcgcatgcctgtaatcccagatacttaggaggctgaggcatgagaatcgcttgaacctgggaggtggaggttgcagttagccgagattgtgccattgtactccagcctgggtgacaaaagtgaaactccatctctttctctttctctctctctctctctatacatatatatatatatgcacatatgtatatacacacacacatatatatgtgttttgttaggcagaaagtgaaaagcctttttcctccccactgcaaaatctgggtgtcccgagacccctcagaattctcggacaggatcttggatcttcatctctgtgcctttggcagccacgaaaccccacccatccttcaagtttccttacaacaaaattatgctgtgctcttctggagtggcatgaataaagccccatgaaagcagagagtcccaagaaagggcctaattccaggaagagatggaaactcttgcaggtccccttgcttaagaacaattaagccctgacacgtgcttgggtggcagggtcaggagaattgtctgagggccactgcggcttatgacaggggctgccagtttccttctaactctgagaagcatgtgagctggacttaaactccatccagcattgtctacatctccctcacccttgctagctttatgaccttgggcaaggcacttccttccttgtacctcagcttcctcctctgtcaaatgggtattatagcagtgattaattcacaggactatgttaggataaatgaggtaagacatacaaaaggctttcaccttttataagaaatagtgcttaaatgtggcccatcaatatttcttaccccagcagggcagtattatgcaaatctgtgcttgcatgatgtgatgtttgctgatgagctggtagccaaagccagcccagggtcaatgtgggagagcaaggacagcgggaggtctgactccctgaatccaggtgtgctatgaattccctttgtcagcaattactacaatgtctgagtctccggatgttcttgcatccttgtgcctcacccccttgtgtccagtggattctttttcatccctctttcccgtacgttttgtcttgaactacacaatgtcagtgggatgaggtgcaggagaaagagagtggtcttaagagagaagatatctttggggtagatgaagaatccataaactgcaagactactttatgggccgctagagatgaggaaaaagtagtcataccgaaatgtgttttgggaggctaaattttacacatttgtttggtattatgcaaattttcctttgtagattactctcagcagagaaaagcaccatgatgtcagtgccacgttaaagtggttagtgtatcaccctgcagcaagactgtggaatcagaaccccagaacaatgacttctggcattgtctctctattagtgattgcagctgatgtcattttgccaaacaaaattataagcaaaatggatgttttgggtcagagtgtgccaaggaatataaagctgcatttctttcaataaatcctgccctcttctgccaggacaaagacatacaacctatggtgattgacgttttcaccactaaattatactatgtctatttctagaagaaatgtctccattccaaaattagcaaaccatcaacataacataaaataacatgaacatggtgtcatttcgcaaagatattgattcatgtagactcactggattaataactggtttcccataaaaggagtagtcactatgtctttggtagacagaaaaaatatacactttagaacaatatatattggtacctttaagcctgattgctaagctcaaataaacagaagagttttcagaggaaacattgcaaacgaagagagaggtgacatacggcaatgtacaaatggatccaggagtgatggaaagctaataaaaaaagacaactatttatttatttggagcatttgattttactctattggattacatgaagctctaatttttcactgcagtcaatctgtataaaagttcaactgattgaagcatatatttaattcctaaatgccttttctttcaaccccctacttcttcaaagttggacctttagtgtcttgagtagcaaagaggtttggcttatgttggagcaaccagacccaaggaggcatttaaatgctgtgggtgatttactcagttcctaacgacagccaatccactcttttctcctctaggactggatttgccaatatattgagaaaatatgtttctttgcattttttttgatgttttcttcaatgaagttccatggtaataaagtaattgaaattaaccttcccagtttactcatggcatttagaatgaaattcaaactccttaccagagactgttggttccacatgtgttggttcagcttgcttttctaagctcacctctctctactcttcttgccacacccagggttggccctttccgtcaaaggaacagtgctcatcactgcccctctatttggaatcttcttccagcctttcacattgctgcaaccatcttgtcttttggcctttgctcctcaaagacaccttccttatccatataattttctagaaaaatgaccaactgtccatgacccactttcattgaattattgcattttaatatcatcgtctcttccctctggaatataaaccctttgagaaagggagagtccttatggggcttgttgatggctgtatccctgtggccccgcacagtgttggcagacagaaggtgctcaataactgaatggatacacttctgggaggaagattcagaaacagaaagcaatctttttgactcagttccaatttgctgtcatgtttttgtaggataattgtcttctttatatctcaatttttcttcccttaaataagaagagtggtgtttatatgctgtccagaaatggtgcacagattaagtccattgtaaaacaaaacaaaataaagctatctagttatttatttgcttttaaaaaacttttctggtttcttcacaataggcttaagaggtaagagtttgtttaacatagaaaaccaactatgactgtgaggacacatctgctctagggattaaagctaactcagtatgtaaaacatccctttggaaatggtcatatgtgtcttcaggggatttgacaactggttctcccatttgtttttcattgttgaaacagatcattgtttctgcagttgaatactggattaagtagttgtattaaaaattaacattttaatgcactaaaatcacagaccacgagacgaccacccaaggagacacagaggaaatgggacccagaagagactgcatattcattggttcccattttatgtttatttctggacaaaagctgattgagtaagctggcaggtagactagcctacttcttcaaccattgtgtttccatgcctggcctccaccctcttcaactgggaatagattattttcattaacccaacagtagtgattccccctgcagcttcagtctccagttatttgtagctgaatctattgcttctctggaaaggattgcagatagccaatggccttccaatgctctgggtggatttgctggctgtagtcccatctggaggcaatggaggggagtgcttccttggatatctttctccaggtgaaaccatttggcaaggtctcagaactctaggaacagtctggaagcccctttttttgccaatgttgggaatgtcttgcccatcacagggatttgtctgctttggaggttatcaaacctgaaattgaaggcagtggtccagcaggatttaaagtcttttctaattggcagaacctggaaataatattgtgaatctggaaccaaagggcccctattgccagtgcctttggattctagaaatgtgagctcaatagtacctattgaatagtccctaaatctctgtccttacctcgcaggtcagcagttctagaagaatctttctggacaaaagacctggagttggcacttttggctgccactcaacattgaatggcctctagctgtgacccatcttgggacaagaaaataaactgtaagtttggaaaatgaagacttttaaaaagattagactgggagcagtggcccgtccttataatcccagcactttgggaggtcaaggcaggaggatcaattgaggctaggggtttgagaccagcctgggcaacatagcaagacctcatctctacgaaaataggaagtattagccaggtgtggtggcgtgctcctgtggtcgcagctactagggaggctgaggtgggaggatcccttgagcccaagagtttggggctgcagtgagctgtaattgtgccactgtactccagcctgggtgacagagtgagaccctgtctctaaaaaaataataaaaaataaaaagattagatacctgctggacctcatttgcaactggtaaaatcagaagctgtcttccagcaggtgtttatatgagaataaaataagagagaggaggagctgccccagaaggagaagtccccaggaggggactctcagccagtcacactctgcagcccagtggactgtttcaggaacctcctctccaattcttccacccttgcctgctttttggttcccaacccccactcccacagtgattttgtaattttcattccatccttcctgaagataaaagacaccatgggtgggatccgtgaataaaagtcgttatttatcgatgccggttttggggaacatttttccttctgattcatgaaccacttttctacattcgaaaagcagttcataaatcgttcagcaccggcagaaattaataataatgaatccatttacataaaatagtctcatcctgccaggtgctgataatatttgaagctggaatctctttaggaaactggatggcatatgtgcgtgtgttttcctatacatcagacctcacaccttccttttgtgagttttaccagaaatttaattatttagtggccagtcttgatcactgggagatgctatttgcaaaactggggaaagataaaaataagagaaatattgcagtgtcttaagaagatagttttaagccatgagagttcgtgtctagtgaaattaaccctttgagtagttcagagaaatacagctacccacggaatcattgagtcctaagaaggatcgtcactatcttatggctcacatatgctcacactcacacaagcatgaacacacacaggatttttttgcagtaacaaaaatgaatgcatacatcgtaaactctattttcaaaggtatatgacaaagagcataaattatattataagtaggtcttatgtaaaaaaaaaaaaaaagagtactgtgatcagacgaactggtgcaacataccaattaacacaaacaagatagggtgcctgcctccagagtagcacactccacaaatggactgaagagtttggcagaaatgttttgcttgagtactttttttccccagcaggaacagaaggttaagctctcatactcctcagtcattagaatctgattaccactgtttgttacatggtccctttcttgttttgtatattgatcccactttatcctctcatgctactcctattcctataggaaaacatgcggttgtgttaaatgtacatttttgttttgtttgcatccatttttaacttacgtaaaggatattatgttatttacttggttctgtatctttcttgtttcatgaaacacagtgactttcacatgtacccacattgttctgcaaacatgaaatctgccgcttcaccatgatttcacacacgcttatgttgttgctctctaaatgtaaaatctgctgcttctggttgtacacagttctctctaatgtccatccattcttccagttggctgtctccaattctccatccctacagacaatgctgcagaaagagtcttttcaaacaggtgcaaggatttctttgggatatatgtccatgagcagaattgcagggtcactgcatgtgcatatattaaatttgactaggttgtgccagatgctcctgggtggctggcagctccagtctacattcccaccagcagtgtggggagtccatatccttgccaacatgtggcattatccaactgtcttgtcaatccgaaaagaatgaagcgctgtctcgttttaatggcatttgtttctaattgctaataaatgtgaacatctctatatgtgcttattaattagccttttgaatctctgctctaaatggcctatttacagcctttgtacatctctttccttctgaaattgtttgacaacttcttattgatttataggcattctttatcagtttttgacatcataaacttctccaaatctgtcactgcctataaactgtctatagtgtcttcagttgagtagaagttctcctttttcctctatagttgtacagtcctgtggtaggcagacttccaaggtgccacccagtgatctctgtctcctggtactcacgtggttgtgaatcccttcatatcaagtgtaggctgagcctagtgacttgcttttcatggatggggtatagcaaagatgatggcaggccactccatgattagattacaaatgagtgtgacttacagcttgctagtagactctattgcccttccagcttgcacactttgacaaagacggctaccatattggacaggtccatgagacaagaaactgagaaaggccaatagccattgagaaacggaagcccttagtccaacagcctgtagagaactgatttttgctgcaatcacatgagcctggaagtggatctttccccacttgagccttgagatgactgaagctccggccaatacgtcaattgcagcctggaagagaaaccccaaaggaccctgctaagccacactggattcctgacccatggagataaagaggcacattgttgtaagccattcagtgttgggttattttgtcactcagcaacagatgactcatagcaattctaaagttgtaattttgacacttaagcctttagtttatccagatttcactcctctgtagtgttaggaagagatccagcttaatttttcaacagaattggtcttgaattccaaacctgctatttacattctgtttcacaaggtgagataatgtatgaaaaattgcttaaggcagtgtcttcctcccacaaagaaaaggcagctacagatgcagttatttgctattatgcaactcagtgagaggccattgtagaggatattctccaaaactccctgacaatgagtcacttcctgattgataatttcacatagctgcattcttaggagctcacttgggaacctaaaccatggagaagttaagattttgtcccagaagtctcctctgagacataggtcctctgagacacaggctactttaaggaaaagataaaaaatcacctgggttctgttcctgactactgctgactagctgtgctgtatggagtgggttcactttcctttccttttctttctttcttttttttttcttttgagcctgtcacccaggctggagtgcagtggtgggatcttggttcactgcaacctctgtctcctagattcaagccattctcttgcctcagcctcccaagtagctgggattacaggtgcgtgacaccacatctggctaatttttgtatttttagtaaagatggagtttcactatgttggccaggatggtcttgaattcctgacctcaagtgatccacccacctcagcctcccaaaatgctgggattacaggccactttccttttctgtcttagtttccccatcctttgaatgaagaaggcaaatagggtgatttcactttcattccatccaccactctgttccctgagaagcagcaggaaggccttggagaatgaggattttcactctagagctgcagaaaagcaggttggaattcaccttgtgagactgaccttgggtagaatcaggtcagggcctgattgctctgtccttcctctgccatgtcctgcttggtgctcagtatccccccttctacatgggacctccagctgccctagttgagtcagctctgttaaaatagcttacaggccaggtgcgttggctcatgactgtaatcctagcactttgggaggccaaggcaggcaaatcacttgaggtcaggagtttgagatgagcagggccaacatggcaaaatccggtctctactaaatatacaaaaattagccaggcatggtggcatgcacctgtaatcccagctacttgggaggctgaggcaggagaatggcttgagcctgggaggcggaggttgcagtaagtggagatcgtgccactgcactccagcctgggtgacagagtgagactctgtctcaaaacaaacaaacaaacaaacaaacaaaaatagcttacatatcacacaatggtctctttcctcttataacagccacaatacatttggccataaatttttgtctctaattttcaagtctgtgtctgctgggggagagatgaagtgtgtgcaattctgaatcactttaatgctactcaaagaaataccactcagtcagtcttttggagtcattcctcctatagaacaagccccagtgctcacctgattggtagagacagataaaggagacacccacacaccaaggtctttttggatgagtttgaaactttgcaaaacacctggcagaatcgtaagttctagtctgagcagctcacaatacgtatgaaaggccatcagagaatgtgtgcttttgagacaggttctcagaaaacctgtgggaagcatggctaaagtggtgtgaacataccctgtagttaccaccacctgggacttccacattgaacaggaccactggtggatctggttagagagagagagaatgtgacagactgatgtggcatctgatagctcctgcttcccgtggaagatctcttcagttgtcacaaaggatccgcaagctccagtgaaaaaccaacagctacagaccctgttgagcccatgggggctgcagagcactgtgcttgctgaactctgccactgagctccatgcactgtctcaagtaatcctcaaaactgccacgtgaagtaggtgctcttgtttcccccattgcacaggtgagtcatcagaggtgcattctagggtcaatcagaggggtgagacaacagcaacgataaaccaattcatcttcaattaaggacaccatggacaaaaatatgactgactgggaaaagacattggcaatgtctttgactaccaagggattgtatttaggtaatatcaagaacatcagccaacaaagagccaagaaataacccaaatagaaaagagacaaagtgcatgaaataaaagaagaaattcaaaatgttcactaaaaaataaagagatgctcaaatccacaaataatgagacattaaattaaattaaaacaatgaggaagtaggccgggcctggtgctcacgcctgtaatcccagcactttgggaggccgaagtgggtggatcacctgaggtcaggagttcaagaccagcctcaatatggagaaaccccatctctactaaaaatacaaaattagccaggcctggtggtgcatgcctgtaatcccagctactcgggaggctgaggcaggagaattgcttgaacccaggaagcagaggttgcagtgagccaaaattggaccattgcactccagcctgggcaacaagggcaaaactcctcaaaaaaaaaatgtggaggtaccctatctgtatcattagattggcaaaatatgaggcatgtggatggtgctgttacaagaaaggggtccagatccagacaccaagagggggttcttggatctcacacaagaaagaattcagggtgagtccatagagcaaagtgaaagcaagtttattcagaaagtagaggaataaaacaatggctactccatagacagaacagccccaagggtagctggttgcccatttttatagttatttattgacattacactaaataagggatggattgttcatgcctcccctttttagaccatagagggtaacttcctgcattgccatggcatttgtaaactgtcatggcgctggtgggagtgtagcagtgaggacaaccagaggtcactctccttgccattttggtttcggtgggttttagccagcttctttactgcaacctgttttatcagcaaggtctttataacctgtattttgtgctgacctcctgtctcattctgtgacttagaatgccttaaccatctgggaatgcagcccagtaggtctcagcctcattttgcccagcttttattcaagatggaattactcttattccaatgtctttgacagtgctaagctttaataggttgttggggttctaggagctcccacacggagtcagtgggagtatagactgatgtaggtatctggagaacaatctggcagaggggagtcaacatgagaatctgcatccccggagcaggcaattttgttccttagtacacattcccaagaaattctcacactgctccacatagggccctgagctagggtattcacagcagccttgcctatggtggtacagaattgaagcagcctggatgcccatctctggggcagggatggaggactgtcatctggcagatgccaaccttggggggatcatccagccatcagaagtcacagactatgtgaacccatgacaacaggcacggatgtgaaggcacagtgctcagcaaagacagcgggaaacagaataagatgatgaatgcactcccattgacacaaattatccaaaatgtttgacagtctgtattacacaagtggaatgggagccagttcctggaatattgaccctttcattggtgggctgtaggagattcaataatagagctgggctggcctgagtgttgaacaaccaaccctctggggacatggggaaggggcattttgccaaccaagatgacaatattttcaatattttaaccatagatctggctgcactggtgcattttggctgaatatcaaccctaggtggaagccctgagcacaacacccttggtcagaacggtaacaggacactctcctgttcatggtagggggagaaatccgacagtggggtaagagtccaggtcctgtgggagtccaaacttgcagggcatagacaggagtgatgagctggatgacacttgtgaacatggcataaggggcttttcaaaaaaaggcctcaacccaaagagtaactcaggatagaaattcagacactttgaagactccaggagctgaaattatttgtgtttagggaaaggcctctccaacttgtccaagtgacaacagcatatgtccacccacctactgctctccatgtaggtccaccgtggttagagcaagtctgacaccacccacgaagtctggatgggagtgacagattcctcctgttcaaccacaccacccccaaagggattgccccccgcagatgttttctgtaacctgctctgtaggcaggtgccaggtatggatttgtgagttggggtagctgtgatttggagacacaggccattggtgttgagtttgagacctagtcaagctgtggtctcaggagttccaagaaagtggataggaggttggacatcttttgtggctggggaggaagcccctgtgtgagtactcagatcggatgccgagacgcatctgtttgtgctcattctgtgatgacagggacacattgatcctatgcttcgctagctcacaaggggctgggagtaacaatcaagcagtgagtatgtaagacgaacacaccacaatccccatcattagggtgagtggagtctggatcatctgccctgtcagggaggcagcagactgctgggaaaaactgggtgcattccaaacacaatcagatcctgcaggcgttacgggccttctcaaatccacattggtccatgccaggatgctggaatgccaaggggccattaccccctggcccttctattccagtctgctgtgaacgctcctttggaaatggtagagaatttgcatttatcagaaaattgcttacttactctaatcatctatttgtaaggttttattttagctagataatgaataagactaaattgatgtcaggcatggagtaattttaaccaataccttcagaagtctgtaataccaaatattggaaaattatatgtagggtaatctaaataatgagatgttaaaatttcttggatcccaggaactcttcaattcattttttcctctctctctttcaacctcactgtgggaggcgccatctctgacatctttatatatgatgttctcatttcaaaatgccactgaaccttcaaatgaacacttgcgtatggtccttgaatacaaaaatacttaaatcaagatttttatattttggtgcagccagccagaatgcacagagagagatgggaagatttagctcagaagcctacccaggaaggcagaaaaggtccagctaagggaaggggagaggcaccgggctagcaaacagatacacgtggagatgctaaagatggaaggaagagtgtcttcctttggcctcctgtaacctggagcaaacacaaaatccaagttgcaaaggaaaattccttctcctgagactaaggacttcaaaagatgctccaaaaggaataaataccataaaatgtatactgtgtgcatcgcctgtggccagctcctgtgtctacagagaagaaagaggagatggtgcactgcaaggcaggtggagctcagtgagctcagcatgaagacctgggagctccctgaccattgcccacaagcttacttcactattctagtctcagagcaaatcgggtaaatagataatttgcatgagggttaaagaagagttaaggggatccaatgcctggatgagtccttgtccgctaagggcaaggaatggggctggtgcttgactgacgtgattgaacttgattataacagtgacagatacattggctagagtcacacctttttattttattcactttatctttatttttccagccttattgaggtgtaattgacaaatacaattatatatattcaaggtgcataacatgaggatatgatatatgaatatatcatgagacaatcaccacaactcacttagttaacacatccttcaccttgcatagttacctttttgtgtgtgtggtgaaagtatttaggatctactctcttagtaaatttcaagtatacaatgcattattcttagctgcagtgaacatggtgcatattcgatacccagaatttattcctcttatcattgatcaacatctctttccccttcctgccctcctcaaccctagcaataaaaattctactctctgcttctatgaattcaacttttttagcgtctacatgtaagtgagatcaggtagtatttgtctttgtctggcttatttcagttggacaattcaattagacattttgtaatgtcttccaggttcatccgtgtttttgcaaatggcagaatttcctcctgttttatggctgagtaatattccattctctctctctctctctgtgtgtttgtttggggtggggtgtcacattttctttattcattcacctgttggtgggcactagattggtttgatgtcttggccattgcaaatagcactgcatgtcataccttttcatagaggaggaaataaaagctcagtaggtgtaactaacttgccacaatcctatacacagggagtggccaagccagtgtgtgaaacctgatataactaggtctgaagcccacactctcaagggagttgccagggatcaagggaaaagctctagagtagagctatgtggctgagccacatatcccatcgatggagtagcctctgaatatttaatagtgactacactttgccaaaatgggtcaaatattttggaagtttaaagtttggagacaaaggtggaaaactttgtgtgtggagtaagaaacgttggtttattttggcactaagcccaccttggttttgttgggacagctctgcttctccctattattaggcagtggcctgccagccttacccaatactgcaaggaacccaaccagtgaggggagccgcagtcagggatttgggaagcgcagagtgcaggcaggtcccgtgggttggtaaagtcacaggaagagcagatttgatgcactttctgccttaagtgtccctttcctccattctctgtttctcttggttttgttttgtttttggaggagatactagaatactcatactcaaccttcaaaactcagctcgaataccaccgcccccaaataacctccccagattctaagaggtcagattaaaggctcccttagttcacaggcaccccatgcacttgctgttgtgtggcacggtgtgcttgtctgtctcccactgctaggcagcgagctttcagagcagagacacacatggctgttgcggaagaactggggacagatgaagcgcacgtgtgcatgaggctgtggtgcaggcaggggcagcaggctgcagcctggaccagccaccttgaggaagaagggcatccagactgctggtgacccatgcagccagtgcagagtgagagcccagcaaagtggcctttttgggaatctgatatggattggtacatgggggcaggggccatgttggccaaccagagggcagggtcgctcagtttgtgagtccttgcccggggctgtctgcatcaccagtctatcaggaagttccttcctgcaatagcagtgtttgagcggggattagggcctgaaaactgcaagtagtgacctcactccccaccccacattgatccattgactattgactagaaccaagactggaaaggtcttattcccttctcagatcctcccagtcctcagaaaagggtcagataaagtgcgaccaagacacagaggaagaagatggaaagggagagaaagacagagatggtagacaacaagacaattgtgatgcgaagggagagttccaggcaggagagggcagcattggagggagattcacctgagatccatgtaggaaaccaaactccagcccagcctctgctaccaagagggtcccacctcacccagttctgttctcccatgcatagaaaaatttaaaaatatattttactcttttctctgatactcaattcccctgaggaatattttttgttttgctttgttttgttattgttgttgttgttttttaagggaaaaatgttcacggaaggttataaaacacatataatttactcatggtaattgcccacatgttatttatgtgctgtgctggcagtgagaccgagaagaacgacttgatcaatgcattagtctaatcacggggttcctgctcttaatttcttttgctggtaatttccatactcaggcagcaatgcgtagaattatctcgatttacagatctcggggccctggggaaaatctctttggagccatttctgtctcctgggaaatttgaaatttattcaacactgagtttgaaagccctatgatatgggttcaacaactccaaataataccttagaaatttagtaggtctgtgtgacatttttccttttttaattagtaactttagggggctcagaaacggatcacagaacatttttaagaacaacttttggtcaacttgaagccaagatttggcagacttggcgtttgccgggaaacacacacaaagaaaaacactactctttcttttcttgttaaatccatgaaagttcctggcttggctttgccccgggtttgtaacacagtcttctaaggtggagtatttatggcaaatctattgaaagccatgggagaaatttcctgtaacttcaatttactttgacagaaggagacgcaacacctgctgttagctgaacctgctgaccaggctccgtctcctcaaagttttgggggagcagagaagatggtatgagcagaacttctttctcttggatcagctcctaggtttgttctagtgcctgaagagaacaggttgcagtatctccaactgcaaagcaggtgcgtggagccacattccttctgttgagcaaagcccttcagaggggcccacgggcaggtgagtcctcctcccttaacacaatatcacagacagtccagcctccaagcctcaaagggcagagcaaaagggccaaagaggagatggcaggcacagcctggactgtctgagatttcagatccgcagaggaaaagttggcaagcgtcgggaccaacattcttctaccattaacactcacctaggaataatatctatattttgggctggcacttcaggtttactgtctcgtataatctcaacaacctgggaggtagatgcattcatattcttattttgcagatgaggcaattgatcctccgacaggttgaggagcacctgcaaggtctcagacaggtggtaagtatcagaaagagagggtttaaatgcagattcggtctgattctgcaggagatctcatacctgaacaggtgagtcatcgtcacgtttcaggagcaaccaccagggcatgctgaacttcctaaggcagtagggtgaccagctgccttggtttgccggagactgggggtttcccaggacacaagacttgcaatgctaaaactgggaaagttctggacagactgggacaagctggttcccttatctggaagtgagaataaaacataagctactaagagtgctgtgactttaaactgtaaaatcaaaataagtagcaaaccagtggtttgtgggtaggatgtgagtctctggcgagtttctttttaactgcatggagttcctaaggcattttacacagattgcatttgaaatgccagagttgttgcatagaaagttggacctcgggctttcaaaaaatagaaagagcaggtcttggaaggctacagtcccagcaagggtgatggctcctttcgtaattctcagttcctgctggccaaccttattcattagaccatgggcttggctcttggagacagtcaatgttttccgtagagaatattaccccgcagtggccaggaagcaaatgccaatagatctccaaaatatttgatcataccaatggattgcctagaatatcctgtggtctttctgttgcctttgagagaacgtcatggaataccaggtgggggtggggcaggtgagctcagggtagcaaggattctgacatagcaaagggaaattctgtatgggacagactcaaaggtcccagatgccctctcaaatgaagatggcaatattccaaatattcattgatccataagcatctcacggcaggtataagatctgggagaactcatcttattccatccccaggaaacaaacatcccttcttgggcaatgtctccaggccacgcttctcatccgcagagcaggtgcctgttctccccgggccatctgacaggggagatagaaaatctgcaagagaaagctcacagcacggggctgagccctggaggggaagcacagaggcctgtattctaattcactgatgatcaatttgcaagttctttttctcttagttcccttagtttccttccaggtaatgcagaattccttgaagcttctctaggttgttttactttgcaatctttggtcagaaggtctttctcatgttaacaggtgagttaaggtaagagccccagactcctgggcttcccccagcccactccatgatcccaaaagagattccactgggggatacagtttgaatcacctgaactagacaattattacagcttctcttccaggttgaatatttcagggtcccttgccaaacaggggaagatcttgttaaaccaaaatcccaaatagatttcaaatatgctggaagtttacatgaccctaaagactgctctccatgagagactcaggggctggggtagtaccttctaaatttccatgggaaaatgaacatgctccagcaagagcttgggaaaagaagatagtccctaagttttattgtttgaaatttgtcactcaaggatgtgaacgtgtcgctgacaattatgtagcatctcagagctcagaaagcacttttgcatcgattatttcatttcttgttcgtgccaattgtgtgaggtggacaacgttatgttcatatgagaaatgcagcccagagaggctcaaacccagcacttttaactcccaatctccctcttttctcagtaccatgtggtaagtctttattaaccagagtgtccaattaaccagaacatgcctgtgtcttagggatcatcccagactgattttctttgcagaaaaccccagggagccacagcctttcctgcacctccttttgttagctgtatgtttttttagcggcccagtgaggcctgcatttcagagcctgtgttgcaaagctcattgctgtggaggagacggttatgggctggggcctgggtcttccgccccttcctggcagaccaggagcttcagttgctctctgtgaagttcttctttgcaggagcctgacacagacgacagccccaggtaatccctattcttcaagaccaagccagggaaaatcttccagatgttcttgctactcaccccgaccttgcggtcttacccttctggctgaacaagagacaaacagctcctctccacttggctgtgtgcggcttaacgaatgcgtatgaagaccgtataaataattcacatcactcaagaggtggcgagctgaacaagtcccttctggttacatttatttcaagataaggtgaaactaagtgagtgatggcccagttacagaggccagggtccaaaggggattgggacactctaagttacaccaccagagtgatttgtgcagaactgtgtcaacttagagatcctggcaccttgggggaaagggaaatgtcttatctctaagaaaagtgatacaggatgagtattttccaagtacagcctataagctaattctgcagaatcaatttggctctgccaggaaccaagtttctgctttaatctaagaggaactctgaattagtaaccttgcacatgttgtcttcccttggaaatgtcactaagggactcttcgaagcatgggtgtgggtccttggtgtaggtcctctaggtgcatgaggtggcactttccagaagcatgggtgaacctcccaagggagtccagagtcttttattggaatcaatggatgagaaaaatattgttttgcaacttgagtgaatgtggcctccatgatcaaaacctggactagaaaagcctgtggagtggccctagaacagggcaaggtagagaggagagttttctcctgctgtgaatttaccactcattcctgtattgtagccacatgctttaattttttttcttctcccttttcccacagtgccccctaaatatttccactgaagacttttagaactttggaataaggaaattgtatctccagctgacaataaaatttacgaagcaaagaatgcctccgttaatactttccaaacgtctttgtttttgaacgagcaagatgctgagaaccttccaattcagtaaccctgcctctgacaggcagcagaacagttagcaaggttgacagatagatgcagccacacgatgcaataatccttgctgcactgaactttgtatttaaacacttattttatgtttaattaatttctccaaagaggaaaacttccaggctgcctttgaagccggctgtttgtttaagatattttgttttaagaataagagaaaaaaaggaaggaaggaaacggagggaaaatgtttatgtttttcctgttgttttttcaaatatgatgtgacattgtgaaaaggcctcctgaaagtgcaattttttgtttgtgatggaagagagatgcacctatgagtcttacatcatcaaagaaacagacgcttatctataatttatgctttgctttaagcttctgctgatctgatgtggcttttttaagacaacacaggcagccctggcatcacttgtcaatcatcggggcatgctcaaatcgtagaccattagcaggagggacggcagagtttctttaatgacgcttttatacggggcatcctggcagtgaaacagagagggtttgatttgatcaatgcattagcctaatcacagcgttcctgctcttaatttcttttgtcggcaatttccatacatgggttgcgttcagggttctggcaaaaacccgttcagaactccgtgtgacatgtgcagtcaccttgcccggatttctctcggtgggaagcgacgtctgcaagagaggggacggcggctgggctggatggctgcctttgagtccgtcctgcggtgaggctggggaaggcccattccacgcgagccttggcttcagccctgaggtgcctgccagcccccgtggcagaccccggccctgccaatttcagcccccttggtgattctgttccagcgctcgccaaaagcagaatccgtgtataatgaacaagtttcatgttcaacattttaagtgtctatttatgagtcccagtaattagccctttgtctgcaattctggcgatgatgattagaattccatctcacgttatgaatgctgctccccaaacttgtccttctcgcctggagaatcccaagcaggtgggcacctgaaaggcaaagaaagggggcgatttggggagtggccggtctcttcttttaccagccctccagcagcctccttcctttgatcccattcttccctggctgtatgtaatttcagacttctcagaatccattttcctggcttttgttctgaaacttgttttcttctcatcctccactgtcatccccaaagggtgcatttttttatatcatgccctacacatgatatttgtaccttttgcaaaatcttgtcaggatgctatgaggtttgagagtctttccaaacgaatcattctcagaatcaaaatattatgaaggaggccaaattatctctaattataacctccagaaaagtggagaactttttcaacaaacagaacaggggtaagcatcttacagaaatatttgcaagaaaagtaatattctttttttttaaagctatcaaatcatgtaagcatacaaataaatgtattttaataagggtaaaattactagttaatgagtttgctttggggttttgtatcttcggtacaaaaatatataaatgcttttattaaggttgtacctattattttctaaatgaacacaaacacacaatctaatccatttagcaataatatattttaacatatcacttactccctctgccacttcttattagggtacactctagaaaactgaataataatctgtaccacatagactctcagcatcctttatgactataaaaggaattcgagtttttgatgatatcacagcaatgtaaacagataattggaaagccagggcttcctttagagggaagccagggtcagccttggggcttggaattgggcagtctctttgcaaacttgtcttattccatggataaatttcttcccatttcccccagtacctggaggatggtggtggtggtttctggaggacttttctccaccctgggccaggacttctggggaggcagatggagtagccgtttgaagttctgagttcatatctttgcagaaagaaaagcatctccaggcttccaggaagccctggctggtggctgatgtatggacccaggcagggcaatgattggccagtcatgaaaaattagcctaactcacaacttcctgaagaatgaaggagaggagctgcgaaggcaaacaaccgtgggaaggagaggcccggttcgtggctcatgtctgtaatcccagcactttgagacactgaggcgggctgatcacaaggtcaggagatggagaccatcctggctaatacaataaaaccccatctctactacaaagacaaaaaaattagtcgggtgtggtggtgggcgcctgtagtcccagatactcgggaggctgaagcaggaaaatggtgtgaacctgggaggcggagcttgcagtgagctgagatggtgccactacactccagcctgggcaacagagcaagactccgtctcagaaaaaaaaaaaaaagaactgtgggagggagaaaaggccacagagcactctttccaagttagaacaacgcttgggcatttcttggttctgcccttatcttggtccatgactatggcttgtgtgtgtgtgtgtgtgtgtgtgtgtgtctgcttcagtaggctaattgagtatctaaacaaactaattaatcacaggaattcatacaagatggacaggtctggagaggtgatgttcatcaaacccctccatttgttttttaatccttgcagcaatttatttgctgaatatgcacatttcttccttgaaatttcctagctgtggccaaggttaactgtatacagactcattcagtatttatgattttgcatagtggagaagtttttttttttttttcttcagagtcagagaatctgggtgcattaatcaaaaataatgaataaaatgatccgtctgacaattctcatagccgcctaggtttcaggagaataacgaactaactttattaatcaacagttcctgattaattgttacaaagtgtcatccataaatttcccttcattttaataatacttgctgaacgctaacaatatccccagtgatttcagatttatggcagcctgggcactgcgaggagtgtggcactccagccttctctgctcccccgagcctgagtggctcttcaatcccagcctgatctctgttttcctggcacccctctttctgtgaccccttcttccccacccctctcctggctcctctgcctatgtctgccaggcagagaaaccaccggctcccgggagcacctgtgcttggcaccccagccccaccagggctccccacccatttcacctcttcaggcccagtttcatgaaggataacgtagagaacagcgccgcaacccattaaccatgacagtttcacttttctctcctaattactcgttcctgcctatttggcattttcttagaaaaatttgttgaataatgaccagcattaaaatggaggctcttaagaatttatacgcagagcttaatttatcatgtactttccttatcttgcagccgaatttatttctaagtgtctttgctatgcctgtgacagtgtagtcattttcttaagggcacagcatgtatcggtaacacatttaaaaatgcaacactatttaatcagaagaagctcaggctggtttctttgtgaattgtgtttgtttactgcaactgccggcttgacataaggcaattagtactaattgtttaacccagctgccttgctgagagcaaccaagaacttttgtactttatcttgttttctctagtcgctctttgctatccaattgctgccatatttgctcttgtttccagtgttttcaacagggtgtaattctgcttttgtgaaacgggcaggaggctgtcttcctcaagagaatattgtgaggaggacaatcttcagcaaagttcatctggctggctcttcttgtgggttgctgtgaggtctttgaaagccagcaagaaattgaggtcaaaatggacaacgggaactcaaaaactgtacgtgagcctgggaagacattctctcccccgcctgcttttagctaaacttctgcaaaaaggaaaatcctaaggctcagatttcaatgggttttaagttatgaggagaagctgtaacttcaggctaccatctgtctgcctcgaatattttacttcttgcttattctttgtcaaagtttgcatctataggaggccactgggagtaggaggaaaattcatgatttatcatgttttgatttgcttgtaatggcttaaatatgcttccacggagtctcagagattacatctttccaaaagagggaattgtattagaggtggacatgaagcctccccttggggtggcggagttgttgcaggatggctctggctctggctgaatcagggtgaccctacaccattgttgttcagccaccaggatatgatggttgtcctaggtgcatccctgtggaccagctagggtagcacatctccctgaaagattgcaaggaccctgaggctagacacttgatcacagcaacaatgtcatatacaggacactatggggcgtgtcttatagaagtctgttgaattactaccaggccaatggccaccaattaaaatacaatcatgcactgaataatgacatttttgtcaatgatggactcataaacaatgatggtcccataagattctaatgaagctgaaaaattcctgtcacctagtgatatagccattgtgatgttgtagcaaaattaattgattttttttataaatatggcatcgcccaagtgaacatggcttgtctttttttagacatagtcttgctctgctgcccaggccagaggaatctcagctcacttcaacctctgtctcccgggttcagggaattctcctgcctcagcctcctgagtagctgggactacaggcacaagccaccacacctggctaatttttttgtatttttagtagtgagagggtttcgccatgttggccaggatggtctcaaaatcctgacctcaagtgttccacttgccttggcctcccaaagtgctgggattacaggcatgagccaccatgctcagcctacgttgcttattaaatctacagtagtgtacagtaatgtcctaggccatcacattcactcaccactcactcaatgactcacccagagcaaattccagtctgcaaactccatttatagtaaggactctatacaaatgtatcatttttatgtttcatattatattttcactgtgtgtgttctatgtttaggtatgtttgaatacacaaatccttaccatgatgttacaaatgcctatagtatttagtacagtaacatactgtacaggtttgtagcctaagagccgtaggctatcaagctcagcctaagtgcatagcagcctctgtcatctatatgtgtgtacgtttcccttatgatatttgcacagtgatgaaattgcccaaggatgcctttcttagaatgtgtaaatgcaacattgcaagcataaagatgaacatcaaagaactcagcccaggtgtcaggggatgaaactccacctatgggtgccatagttggtaagtatgacagggagggatgtgggtcattttcccagcttatgattaggtttgttctagcagccaagagtacatgtgctgactccaagtgagttcacacatacagaaatgtttttctctcacataactggatcttcagagataccggacttgatgcatattctagtagagctcaataattcccctggaaatctgggtctttctttttttgaggtcagctttggctccatcctctggctgactgtgcatgtgattgctggctggtggtccattgcagccaggacggcatgctctcattctctttccaggtgaacaagaataactgtttctccaattacgggacattataagttgtttccttcattctgattgaatgcacccacgtcgcttgccacatttggaccaataacagatcccagaagaaaaccatgccgattggcttagaaggctgtggatgtttccaaggctaggaaaataactgagcagaatcaaggctgtgttggaaaggtgtgctggagaggagaccaagtgttacaactcagatctatcagcttatcaaaggaggaagaaagctagctcttgggtgaaatttcccaatgtttaaataaaggcagctaatgcaagttttgccctaaaaacgtcatgtaagtcagtggagcacggtggctcaggcctgtaatcccagcactttgggaggctgaggtgggtggactgcccgatctcaggatttcgagaccaacctgggaaaccccatctctactaaaatacaaaaaattagccgggcgtgccctgtaatcccagctactcaggaggctgagacaggagaattacttgaacctgggaggcggacattgtagtgagccaggattgcgccactgcattccagcctgtgtcacagagcgaaactccatctaaaaaaaaaaaaaaaagacaaagcaaaaaagcaaaaataaaaacaacaacaaaaaaaacaaaagcatctcacaggtcaatcatgtgatcatgtggcacaatgaagcatgattaagcaagacctgactctgattcctgagtctccagttctggttctctggggaagtaggaaactgatggaatggagaaagccaagagtgggtggaattccatccacaggatggtcaagaactctagacttgagaagctcttggcaagtttctccttccgtcttgtggctgtctgggaagaacacatgtaatacatttcagtaggctcccaacagcagcacctcagagacttttaaaaggtcaagagctttcttaagaactactggagagtaacttgggtgctggggaaaattaagattaatatacattggaagttaaatcctgccttttttttttttaccccctaggaaaactcttaatgttagcagaagcctggatcagctgagaaagctacaggttttctgttccaaaaatgcttttgttgctaattaaaattagtctaattttgaaatgatcacatcattaaagagtatttcaactgatgttgatttgatgatacctacaaacatcttagaataaagaggctggtgttttagcattaaaaggtgctctgattagacctaaatctgtgaaattgatgacatgagcttctggtacctcttcattcgtttttttccccttctgcataaaataattatgaatacttcactccatgcaatccacgtttattttattttttacagggttgggggagggctggattaagtgctagctctttgcttgtctatggtattgctctagcaatatcttaattaagtctagagtcaagatgaaatatgtgccccaagtatgtttctaatcctttcaaacttgcaggtttgatgtgtgatcctgggccaagtctttagaatggtgtctcttatgtcaataaatcttctgagacgtgtcagccaggtcattgacatctttggtgaaatggagaactggctctcagaggggctgcaggttgaaggcacagtcccagaggattttcaccttcttccccagggcagggctttttccacagtctcctctgcataaatattctgtgcattcatgtctcctttcctctacttgcctggcaggtcaactccataccttctcctcttggcctatccaaactctaaccacctgcaaaagccactcctgaaatcaagaaggtttctctcctttatctcttgcaggagttaccaatgatgccaaccatttggatgctcaatcaaagtactttagcagatttgtattaagtacctggattcatccatttgacacatatcatagaacccatgcttagagtaatgagaaaggcagacaggcagatgtgatcactgctcctaggacattcacattcagaggtgtgatagggagtaaacagtgaggcacacgcagcatttcagattgtaaaatgctcacaaagggagtgaagagggtggcaggacaggaagattggtgatagaaagccatctgaacaaataaccttttacccctctcccaagataaggaagacatgtccagtgagtggtgattcacttctcatgtttgggtatatctgataaggaaagtcaaggctgctgggccttggccatgacctaaggatgtagcagaacttcatgaggatgacctctggagaggatggctttggggctgagacctatagatgagaagggaagagcctttcaggaagtccatgttgtttcctggagtccactgtgcattcatctaatctttccacctcctagactgagaaactgagaatgccttaaaggccagattggctaaattcatatggatagggcctctgaattctggcagtgggtgggccttctaagtggtacccttcccagtagatacttgctgagcctaactgaaggagaagcagtccagactcttcccattccctaaagagaaaaaagttgagagcaattcaggatgacaatgtgaccctgagcatggaaacctcacttctagaagtgattatttttcttagacttcatgtcaccagtatttcgcaagttgaaatgaaaaccacagaggcgcttcaccatttattgcgagtgaagaaaaacttctaagcttcttttctgccctgactttccttctagactttagaacacctctcatggcccagccataaggccttcctcaacacagagtagggctgaaacatctagcttatggtgtgattatttggggccacactcttattcctttaagaccagcccctcccagaagatcttgcctgattcctccttaagaatcagtgcaagtgccctagaagtacaagcaggccaggccatggtgtgtgtttgcccaacaatgttttaagactctctagtacagtggggattgaccagagctgcttcctttgacctcaaagactgtcatatagtcatgatctggagagtctgtggattgagcacctgagccagagtgaccagcagcaacttgtctgggcatcttgcaagtaacttttttttggtttatttttgagacaaagtcttgctctgtcacttgggtttgagtgcagtggtgttaacatagctcactgcagcctcgaattcctggcctcaagagattcttctgcctcagcctcccaagtagctgggaccacagatgcacaccaccatgcctggataattcctttttagtttttgtagagataggatctcccagtgttgcccaagctgatctctaactcctggcctcaagcagtcctcccgcttcagccacccgaagtgctgagactacaggtgtgagtcactgtgcccagcaacaaaaaaccttttaccaccctccaacgtaaggaagaagtttccagtgaggggtgaaagacagtgacttggcttctcatgtttggggtatatctgttaaggaaagtcaaggctgttgggatccagccatgacccaaggatttagcagaacttcactgaatgttttgaatcagcccatatggcttcagattggatgtccctttggtgctgggctggacctttggctctgagcctctgcacaatcatgaatctgtacaatcatgaaaagcagagttcacatttccccactctgtgagctactagccacaatgaccagtaggtctcacgagtccttccccctacccttcccttgaaggcaacctcttggctttcatcatcatgtttggccacctttggggaaaaggtagaacagttaacatctgaggccactttcaagacaatatgtctcaagcttcgtcccccatggtggtggcacattgtgaaggagggaacaaagaaaccactttttctatcagggactttccaaagataagataattttgttcctcttctgacctataaaaaagttatcaaaaaaaactctagtaacattcattttcatctgcatattatatttacaatgattccagaatagaatacaaatacacacaatgagatttctcattgcttgggattgtctttgcctccaaacattccagatatatcacacagctgttgatttcaatgcccttggagagacacttcaacacacagtaccaagtttcaatgcctactttaaagaggaaccctgaatgcaggacagataatactttagctcttgatttcaatgattttactgtttgtattgaggttttgtggggtgtatttatttatttattcctgatacacagagtctcactctgtcacccaggctagagtgcggtggtgtgatcatgacttattgtagccttgaacgcctgggctcaaccagtcctccaattcagcctcccaagtaggaccacacgtgcatgccaccatgccaagctaaattatctctctctcttttttttttttgtagagatggggtctcactacattgcccaggctggtctcaaactcctaggctcaagcaatcctcctgccttggcctcccaaagtgctttttgtattcttactggttgcatgagttctagttgaatgaataccagaagtaaatattgtatggtatcaaacacgcaaggtagcacacagtgagggtgtaccaagtggaaatttaggaactcagctgaagcccaagtgactggctcatgtgaggctcccaccaagctgtaattatagatgagcggcaagccacccagtgactgtccctccaggggtctgccagtcctgtgagaggagccaggctctatggtgctgatcagcacactcccactttcctcggatggatctttctgatggacagcctgctggctcctgtggaaaaagagaggttaacagaaaaggacagaggaggggcaggggagaaactcctctgactggagaccatggtgtgcacaggccccactcgtctgtctgctggggatgatgcctggccctggtgtgtgaggtcccgctcatctgggttcctataaatctttgagaactctgtaagataagcccagggtcaccaagccccaccccatatcacgagtccagtatgggctgacccattccaacacccagtgtcagtatctgcatcactgtggcttggggctatttttttttttttcagagcactgaaggctactctgcctggacacaacaggtgggatgtgccaaggaaggaaggaacactcccagcagcagccctcagccaatgactatgcaatgagttgcagagaaccacagcacttccttcacaccccaccgggaacgtcctagcatctcccatggtgccaggcatcattgtggtggccatcttcacaatgcatttgctggtggaagaactgtctgtgccacagtcgcattcctgccagcatttcctagggagctgaataaggagaacacatggacacagggaggggaacaacacacactggggcctgtcggcgagcagggggagggagagcacaggataaatagctaatgcatgtagggcttgatacctaggtcatgggttgataggtacagcaaactactatggcacacatttacctgtgtaacaaacctgcacagtcagatctgtgttcagggtcagcttctggagcaatgcaaactgagacccctgaattcttagaatgtcagtcaggcacctggtgggcaggttcctggacctctcattttttactgactatgtaggaactcagatcaacttgccctcacctctgccctgcagtggatgttctggcaaggagatcagataaggaaacagccctttcctacagagagaaagaaccctcaaaagagaggatctggtagcgatttcctggagcagggttgcaaagagaactcctacttttagtaaaggaataaaggaaggttcctgccaggaaggataatgataggattttgaagggtctacaggagctggaaaatcaaatgggatcagaaaaatcacacaggtgggaatattccaggacaacatggagcaccatgagtaggtggttttggctggagtggatgaagggcttatgaagggaggagacctggaagagaaagtggcaaaagaacattaggaagatgcaggaggttgctgggccctatgcatcactcacagaagaatttagaatagatatgaagcatgtatcgatgctcctatctatggaattaaattgaaataagccctcctcggtctagctttggactcaagccattcaaaggcttaagggaataaaacagaaaaaaaagataagaaatgagttcaacctgtcaactgtgatgataacagtgattgcaacattgataaagtgctttagtagaaatatggaatttagaagaaaatgaaatgaaggcagcagactattctcactgacagtgatgttggcaagcaggaaggcttgactgctctgagatgggtcatccccagccaccccacaccttggggttcccacaagcctgggttcaggggcttagtttttcaggatgggaacccatcccattgtgttttttagctggattcaaaatctcccattctggaaatgatgggaagccaaggtcctgagttcactttattagttttggggagagcaataaaacagtctaagatagaaagtcagggcaaaggcaattgcctgttcacaggatctctcccacacacctccttggcttagtttcatggaggctgcatgcaagaaataactaagactcgtccaaggctcaggctgcctaaaatcagatctctgtatatctctaagcatcctggcaatacttccttggagtggtaagtccactgtactgaacggggatcagtgctggggttaaatatgttttttttcctttttccttttggtaaacacttttgaactttttatcaaagtgtaatgtgcatatggctgtggagaaataaaaatgcttttacactgttggtggggatgtaaattagttcaaccattgtggaagacagtgtggcaattcctcaaagacctagaaccagaaataccatttggcccagcaatcctattactgggtatatacccaaaggaatataaattactctattataaagatacacacacgtgtatattcattgcagcactattcacaatagcaaatacatggaattaatccaaatgcacattaatgatagactggatacagaaaatgtggtacatatacatcatgcaacactatgcagccataaaaaggaacaagatcatgtcctttgcagggacataaatggagctggaagccactaccctcagcaaactaacacaggaacagaaaaccaaacatggcatgttctcataagtgggagatgaacaaaaagaacacatggacacagggaggggaacaatatacactgggacctgttggtgggggctggtggagggagagcatcaggataaatagctaatgcatgcagggcttaatacctaggtggtgggttgataggtgcagcaaaccaccatggcacatgtgtatatatgtaacaaacctgcatgtcctgcagatgtatactggaacttaaaattaaattaaattaaaaaaaagaaagaaaatatccacattaacgtgatctattcttcaggaaaaatagttgaaaatgcaaccaactcttggtgaaatgtataaataaatctttgctatactttacttcaaataaattattttaaaataaagtacacaagacataatcacacagctgaataacttttcacaaaccaaatgcatccatgaaatcagcacacacatcaccaaataacattatcagtaccctcagaagtctcataaggccacttgcagttgctaatccccctcacccagaggaagtattctgacatctggattagttctctgttgcttaaaacaacagtatatgtttattatctctcatagtttctatggatcaggagttttggagcagcttacctggatggttctgatttggagtctttcataaggttgtagtgaaaatatcaaccagggttgtaataatctgaaggcctgattggggatggtgaatctgttccaaaggtggctcactcacaaggcttgtaatttgaggatggttgtttgtaggcttttatttctttccatgtggggcctcactaaaggctgcttgagtttccttccaacatggcagccagtttcctccagagagtcacgtgaagcccaccttagaaatcacatgatatcacctccgccacattttatttttttagaagcaagtcgctaagtctagcctgtcttgaaggagaggtaattaggctccatctttcaaagcgaggaatgtcaaacattttgcagaaatattttaaaatcaccacaacttgtaacactgtagattgctttcacctgtttttaattgatatgcaggagattgtacagtatcacatacagtatgtgatgacacacaaaagacattcaaaagtatgtcttttgtgtctgccttctatcagtcaacattatgtttgggaaatttatccatgttgttgcacatagttgcagttcattcattttcattgccatagaaaatgctacagtataactataccataaaaatgtgtatctgtgcaattgtagacagatattgactatcaggaataaagttgctatgacgaatttaggtttctcttggcttgcttgatggtttaaggccagctcatgactctgtcccatgagaaattattgtacagtggccttctctataaggatgatcaagaaacttgttactccccaaggaaagattgtaagtcctacactgaccaaaactgaggtctggtactagcagtcatagccactttgccatttgtgcaacattttagtccccttcccccccgaactttctttcagaaaatacaaagaggttaattagcattagtcacagtttaagaattagccaaaagcctccgctgtttgcaagctatcttttaagaagctgaagcaaaccccatggcatctgaagccagaacacttctctgagttgtcctgatatctcagaaaaggcctggaggagacatgagcaaatgagtgtactcatgggtgaaccatccagtgggaacagtcttgggacagacagatgtgaggttgcctagcaacgcagcatgaccagggagaagggccctcagagggcatctccaaacaggctgtaaagagtggcacacctgaaaggtgtcattccacatgaagatggagaggcaggtggccctgattcccgagaagtccctggtggaggtggagaggatgcaggcaccaggaataacattgggagctctttctttctcccagaaaatcacttcactgactcacactttgtagccctaaacactcatttctctgctcctcacactcacattcctctcatctcccagtgaggaagtcaagcagatgctgtcctgccctggtctcttctgtgcatacagccccacttccacctgctggagcctgcacttcagtgcctgaaacatttcttagggcactggagtcaagacaacagcatggcagtcagtttccctgctctccaacaaggaggcatcctctacccacaagtgccaggagttaatggagaaacaccgtggctgcccctctgatatgttttggctgtattcccaccctaatatcatcttgaattatagtttccataatccccacatgtcatgggagggacctggtgggaggtaattgaatcatggggtgttttcccccactatattctcacgagtaatgataatgagtaagttcttacacaacctgatggttttataaggggctcccccctttgctcgattctcattcttctgtcttctgctgccatgtgaagaaggacatgtttgcttccctttctgccatgtttgtaagttacctaaggcttccccagccatgctaaactatgagtcaattacacctctttcctttataaaacacccagtctcgggtatgtcttttttagtagcataagaatggactagtacaccttccctcttgcaagagggctcagggctgtgtcctatgcaggctcctgcagtgcagttccccattgggatcagacgttagtcgcccacagggcaaaccatttgataagatgccatttattggctctttttcttccttgcctcccctacccacctacccgtgttttttcacctcccaaataaaaaacttgcagttgagtccttgtctcagggtctgctctgggagaactgagacccacacaggtggtcctcagaatcatagcttttagctcatttgttgatttatttagtatatacatttattgctcttttgccctgtgccaggcatggtgcttgttgctggaaactcactgagaaacaaaaccccaaaggagcttcccttcctgttagggagacaggcaaaaaccaggaagcatgaatgtaatgatgggtaagagggtgaatctagtgagaggggctacttgagattgggggtgcagcaagagtccctctgagctgctcaggtttgagatgcctggccaggctcagcctctgtggggctctcccacaggaatgcatggctggccactgtccctccctgccacccccaaccccaatacctggctccatggctgccactcaccatgggctgctccttaggggagactcagccaagctcaggtccatgggccaagtgggtttcttcctatcactgcatcctcagattcaggctgccctctagctccagctctcagttggccatagcagtcttctaaaacctggatccaggtgttgtaagacatgggccacagaactgatgcatgagggaagaataaagaccaacgctcatcaagctatttccgtgtgccagactctactgggggcttcaaaatatatggcctcattgacttcacctaatatctgtttggagtaagtattttatcactggtattagagggggaaactgacactcagaggggcagagtgacttctctgagtctcagtgctaacacaagccaaggtttaggttccggtctacatgtctccaaacccattgtctctggaccacaatcatactgtgtacacagtccctgaccggagtctctcctgggacacttaactttcttttaaggactcttcattctcaccctcatgtccacgctggctcagtcttatcctttaagcccttatgatgcctcattcctccaggaagccttctgagaggaacaatcagagacagaagtcaaaggctggagcccctggcttgcttctgggggaacctgagctggaagtcagcagatgacattagagcctccctggccattgcttattgcctgggcacatagtgaataccactcaggacagggtccagagggcaaggctggctggtgtgtgctggcctctcccccatatcccaggctgggcagcccccactgtgtttccatagtgatgatgacaactatgatgatgaccttattggtcatcattgggtggccacattcgatgctcggcgttttctacgtaatatcttaggtaattcccctaccacctgctgctccacaatcaggtctgttgtaacatgtctgttctctaaaggggcagggcacagacataggtgacagctccatcaagaatcaagcggggatgacgcagtgggctgtgtcttgcacggcagtggagaggatatcactgaactctctagactcattttacaacattctcctgtcattccttgggaagtgttcaacaaagcttcttccctttgcattcatctgagcctggcttctgtcagtgtatgcgcttttcaaaaatgctgtcaatcccccacttcttgaatcagttaattaactagttgagtgtctgtttaagcagaggaaaacccaaattgcgtaggatcccacccacctctctgcaagtcaattcagtaaacattcaccgcagccctgctggcttgcccaacacagtggccacatgggagggacgtggaagaggtggccacctgggtcttgcccttgggagacaggtatgtgcccttccctggctaccaaacaggaaagagcatgtctggtgtcagctctgtccttatataatctaggaatgacaggaagcagtgctggcggtgcagaggggaatagagctacgccttgcagaaccgggtttcagctaagataagggtgactttccctttccgtctgcagcagggagtgcaatatgcacagttcactgggtctggataacttgcacagaaattgaagtgtgttgggagaatcataggaaaggctgaagaatgtgagatccaggtgacagaaattaataggtagctacttcaggaaaactctgctggcatgagatgggtgccaagtgttgaccttacctgtgtctgtccagattgaaaggggagggaggagaaagcaggagagggagcaagagtgagagagagagagggttgggagagagtgggagcctcaatgatgcccagcccctagctggggaagggcagggcccttggctggctgtcccccgaaaactgaccacagtgcctcaagagaactgtcccaatcctggtgttttccccagaagatggagatatggatgcaaagtgggtaaagctacagatacctgctccagggcgtgggggtggagggtgcaacttcgtgcctcagagagaagtgtgtgaagggcctgaattttccctgacaaacagcaagaccaactgggagattacaagcactgggttccttccaaagtctaaggaatcagaagcctccatggatgtctgggtctaggagaattctgagaaagcagccagggcatctctggaacatggatgagagactggaggtgaatttagtgttgtggaaactagagagtccaaagagtggtggttgtgaggagtccttgaaatattaagcatagaattactgtaggagctggccattccacttgtgggcacatacacacaagagttgaaaggagggacttgactggatatttcattccaaaaggtgaaagcaaccccaaaaatccatctatgtatgaatggaaaagcaaaatgtgggctatgcataaaatgggaggtattctgccttaaaaaggagggaaattctgacacatagggcaacatgatgaacctcaaagataaagataagtgaaataagccagttacagaagtacacttttgtatgattccacttatatggggtgcctaaagtagttgaattcatcaaaacagaaagtagacatgggcttgccagaaggtttgggtaaagggaagtagggaattattgtttaatgaatgtggagtttgtttgagatgatggaaaacttctggagttggattcacaacaatgtaaacacgcttaatgccatggaactgtacacctaaaaagattaaaatggtgaatcttatcttatgtgtattttactacaattaaaaaagaatacagagacagggatgggctgcttggaccctgtcaccagagacattcaagcagaagctgcatgactctagatcttggttatgaaatgagactcagatagaagataaggtttgtctcgcccctagactcagggtgatgccgtggaaaggcggctttgcagtcagacaaaaatggatgagtatcccagctctgcatcctagttagctgtgggacttggccgagttgcctaaattctctaagccttcccttcctttgtcatctgtgaaatggatgttccaatgactaccatgctagttaattgtgaggactaaatgaggcaatgtgcctggaaacaaaacccaatggaacccaataaaaaacatctcaggacaacagatacgcacaaatgaccctgagacatgaacagatgctcaatttcactcataacagcagagatgcaaatcacaaaggctcaacacctgaagatatcaattttgacctatcagactggaacatcccatggtttgagaacatacactacatcattggagaggccatagtgaaagagccacaagtattgctggttcaaagcaaaataatgccaaccctgtgtagggcaatttggcagtgtttataaatatataaaatcaacatttcctggtgacctacattatgagatatatatcatataattatctatctatctatctatctgtctgcctgtctatgtatctatctagaggttttcatcctgcctaactcccatagccattatcataatgttggggcacttcaggcctcaggagcagacctcagaaaacagaatctctctctgaccttcttcctcctgtcacctgccccataccctggagaaaaaaatactgcacagagaggccaaaaagaatctgaacggataggcctggctgggtttggatcatgccctttttgtccaatcacatttctacatgttgatcagtcacgcctattcagtgaagtctccataaaaggccccagaggagtgggtctggagcatccatgtggctgaatttatggagcttcctgaacggtggtgcccagggagggcatggaagctcagtgccctttcctttgtacctcacctgtgtatctctccatctgattcatttgtgatagcctttataataaactggtacatgtgtttccctgagttctgtgagccactccagcaaattagtcaagtccaaagagggggttgtggggaccccaacttgaagcccttcagtcagaagttctagaggcccagacttgcaactgacatctgaagtcagggaagtcttggggactgagccctcacactgtaacatctgacgctatctctcggtagatagtgtcagaattgaattgaaatagaggacactcagagaaatgcaagtggcaaagtctccatactctgaagatatcaattttgacttttcacattgaagcatccaatggtttgagaacatacactgttgggagaggttatggtggaagggctacatgtattgctggtttaaagcaaaataaaaccaaccctgtgtggggcaatttgacaatcattataaatatataaaatcagcatttcacactgcagtgttcactgcagaattaatggctcacttggtggtgtgaagaactccccacatattttagggtcacggaagtcttctgtgatgattgttgtgaagagtgagagtaggagaaaacacagtttgaggtttttttctcaaacacctggcaatctcactactgggaaattatcctacagctataccagcaagtatgcaaaatgacataatacaaagttttttttacagtagaaaaatgtataatatcaaaaaacttaaaacaattgaatattcatttataagggactggttaaataaactgtgtcatatccacagaaaagggacagtgtgcagcacaggaaaagaatgaggaagctgcgctaataatacaaagtgacaaaaagcaaaattcaaacaatgtgcctgtgagccacattttcttgtaagagagacaaggaggttaaaatgatatctgtagttgtttctttttgcctaaagaaaccctgtgaggataaacacaaaactagactaggcatggtggctcacacctataattccagcactttgggaatccaaggtgggaggattgcttgaggtcaggggctcagtactaacctggacaacattgtgagaccccatctcttaaaaaaataaaaataaaaaaataataaattagccaggtgtggtggtggccttctgtggtcccaggactcaggaggattcctttagcccaggagttcaaggctgaactccagcctaggtgacaaagccagaccacatctcaaacaaaacaaaacatgtaactaataaagccaagtaactaataaaaataatttcctgtaggtgaagggactggactgggactgagatatctctgggtatacttctaaattttagatcatgttaatgcgttacttacatgaactttaatttttaaaaaatgctaaaaataaaacttatgaaacttcattggagacataaaaagaaaatttaatgaataaattggcatattatgtttctattgagtctagagaaaggctcagtactctgaagacaatcaatttatttcaaattaatcaattaattcaatgcatttgtaatcaacaatgcaacatatagaatctgaaagagttattctaatgttcatcatacaggaaagaaaacaattctagaattgtcaggacagttttggacaaagataacgaggggtttatgttatcaaaatatacctttatagtagttaaagtgtattttaaatacattaattatattttattattacatggaaaaagaaagatacattaatgaaaaagagtgcagagtctggaaacggacccatatgtctatgaaaatttacagaataataaaaataaaacaagatctttgttttacaacattaatgcagtgaaatgcaaataggttagaaatctacagatttaaaaacaaaactttgaaagcacaagaataaaatgcagaataatttttagggtttgggtaataaagactttctaaagcaggagagaaaacttagacataataaagtaaaagagtaatcagactttattggcaatttaaaaatcaccatacatacagttgtttcaatttaccagtgacaaacagaaattaaaaattaaaaaaatatttgcaacagcattaaattttcacctcaaaaaaataaatctaatgaaaagtatgtgaggcttctttacaataattataaagtattatcattaataatcatcactatattaccttttattatttaataatgaaatcattattactaagatgtaaatgaatggatctatataccttgttcttgggttggattttagctatgccaattctctccagatgatttattatagttgatgtaatctcaataaagacatcaatatctgtttttggagaaaattggcaagctgacttaaattttaatgagactataaagggctaagaatagccaagatactccttaagaagaagaagaaggtggaaggacttactcttctggttattcaaagttatgatgaaactacagcagtgaagactgtggcattggttcaaggatggataaataggccaatgaacaggaaacaggtcagagagagtcagggacacttgatccatgacaaaaagcacactgcaatggggaaacgatgtcctttcaataaacactactaggccaattgaataatatagagaaaaaggttgactccctacctcacaccaacctgtccatatacaaagatcaattccaggtagtttataaatctaagtgtggaaggaaaacaataaagcttctaaggaaaacattggagagttttcttatagccttagggtagaaaagacttctcaagtaagatatagaaagtagtgtcatagaagaagattgattaattgaactgcattaaaatgaaaagcttttgttcattaaaagacatcatgaagaagcaaagataaatcacagagtgggagaatgtatttgcaaagcaaattaccaataaacaacttattcctggaatatataaagaactcctgcaaatcaatacaaaatgacacacaactgtgccagctattaatttattgcctctcagctccaaattcacccaatttccccctagtttgcaatactggagctgggatctgtactcagttcctgctttgctcagtggctttatgtcaggctgtgtcaatagggatcactgatggaggctgcaagaatggaagagggacagggatgttttctctccctggattttgccattggtggtaagcagaacagtccaagggccgtgagttcctgcagcgcccctgtgacagtaggcatttctcatggttttgggatagcccagcaagctttgtctttattgcagaggcatgtgacaaagttctgcaacagctgcatcatctcaacaatctgaatctctgtttttagaggcctcttttctaagctgccaagtttcttccttggcttccttttctctcagccccaggagtggtcgctttctgcagctgctacccagatacaacttagagtcctcttttacctcttttggttattcgccatctcttgcctacttaagaaatatttgcaatactttttttctttgttcaaatttctgagtgtggaatcattctcctaactgaatcctggcatatacaacaacccaatagagaaacgggagagactcaaacaggtacatcataaagaggatgcccaaatggcaaagaaacatatgaaagagggctcaccttcattactcatctgagaaatgcaaatttaaggcaaacacaataccactatccacccattagaatggttaaaattagaaagactcacaataccaagtgttgatgagaatgtggaacagccaaaactcttacaatgctgataggtccatgaaatgatgaaactactttgaaaaagtgacattgtctatactctgtgtatactatgtggcatacacccaactgcaaaggatataaagatacactgaaaaacatgtacaagaatattcatggcagcattgtttataaaagccaaactctgaaattaaaataaaaacaactcagaggtccatcagaagtagaataggtaaaatatgatacaatgattaaatgcaatgttatacaaaaacagaaacaatctgtacctatgttgtataacatggatgaatttcacaaacatgatactgaccaacagaaataaggagctgggtgctgagaagtatatgacatatgattattctatataaatttttaaagggctaaactcatcttttgatagttatcattgctgggaaatcattacctctagatggagaaaggaggtagtgactgggagggtgtaagaagggaacctcatggcaggtaaaatttttttatttcttgacctgggatatgttcattttgtgaaacttgatgaactcactgttttaaaatcatgtacttttctgcatatatgttattcttcaattaaaaagtaaaaagaagacagaaaaagaaaaggcagcatgttaagacaaaatacttaactatattttattagtgaaagtttaggatccaatccacataaagagtttctgtttaaaaatgacaaacaaccttagagaaaaatggacaaagattataaaaaacaattcacataatacatactattatccaatataaaaggcagattcccttagtttctctcttcgaagcctgggaaataggtacttaaacaccaatggccttgactacccatttgaataggaaaacaaaaggctgacaaaatgttgggcggggggatgtgggaaaaggggcatcagtaccccttttctgactgtaccatcagtcagatataaattgttaaaattcttttggaggaaaatttggcaatatttatcaaaataaaaacaggactaacccctagtccaccatttcacttctagaaattctaaaataacattcacgcatgttcaaaaagatgtaagcaaaataatgttttgttttgtttttctttgagacacagttttgctctgtcgcccatgctagagtgcagcggcgcgatctctgctcacttcaagctctttttgatgccattctcctgtctcagcctcccaagtagctgagactacacccagcacccgccacggtgcccagctaattttttgtatttttgtttttttagtagagacggggtttcaccatgttagccagggtggtcttgatctcctgacgtcatgatccacccgcctcggcctcccaaagtgctgggattacaggcttgagccaccatgcccagccacaaaataatgtttatcgcagcatttttttcttgtaacataaaaaagaaatgggaaattaagtctctatgaatcagaagaaaatcaagtttcttcatacaatggaatactacatggctggtaaaaatataatggggtcctctgtgacttaacgtgacaaaatctagcgtaaggctaactcatgaaagcaactctcaaatcagtgcattaaacattatagcattcatgtaaaagaattaaatactcagagtatgtttgtaagggttgttttcaagtttgtctctatagcctcatagactacttaaatataccataccagaatatttttaagtcacagaagtaaagcgctaataagcaaaaataagcatttaaagtctcctccatgatgcctgctagatagtagaattcttattccctgatgtcctaatggcagactctggctgatgaaagtgatcaacacctaactatacaggcatttcaaacaacaggatttatttacggaggacaggaaggagggagcagaaattcttgttcagaaaataaattccttagaatttcattgagcttgtttattcttggcctactccatgatatggaatacttacttggaccatcttctatcggtttagggatggtgggatgctctctgtcctggacaaggctgatatggatccatagaaataaaatgtgagcctcctgtgtgactttaaatgttccaatagcgaaatcagaaaaaagtaaaatgaaaccagagaaattaattttaataatatatgttattaacccaaggtatgaaaacaattattatctcaacatttaattaatataaaagtattaatggaatatgatgtattcaattttttggtaagatcttcaaaatctggtgtgcatgtcacacttacagcccatcttgatttggatgctatgtttttcttgacttgatctgtatttaaatttcacaaacttcccagtagattcaaatacctaagttgttttgaacatatctaagcatatgagtttttcaagaacagaatcaagtatcagttttttaaaatttggatttagacagaatgaagtaaagttaaaaattcagtgcctccattgccctggccatatttcgagtacccagtagccacatgtggccagtggctccatattggacaaggcaagtggagaccagtcctcccatgtggtcttggaggtgggtcttggcattcttgggaactgctgccccagccagctgggctccctggccatgttagctcttctctgcatcctgaacacgtgggagctgcaggcactgggacaaccaggcaagggctggagctctgccagcttccagggcaggcagctggtcccacttgtctcagacacctggctgcctgacatttacccagcagcctcggctccaccatgcaaagctggcgaggacagaccagggttcctgcaggctgtgaagggctctgcagagggactgcattcctgggggatgagcctgaccttgggatgaacccagtgggatgacataagccatgatttcacaacatggcagtgatcacgagctctctgtgagctggggtggaccgcggtttctgctgagagcatggcggctacaggggaaactgaggcagcccacagctctgtcctgcaccaagatctctccttcaagacaggtcccagagcctcagcatcatcaatccctgggacacacatatcagtggcgagaacttgtatttcctctgaaaacggaagggctgcttttccacatcttgagaagtagctatttttctctttcttccttaaatcagtgatgaagcttctgttcaagtttcattctcgagaactgtgcagaagcttccctcgctttgcgctctgggctgggaagactacatggttccatcagtattctgtgttctcattttggtgaaattgaaatttcatggattaaatcacctctcctatgtacccagtacatgccatggagacaacccaataaaaggcatggtccctgtcctccaggatcccacagtttcatggaggaagtcaaaggagacttctttttattaaaaacagtggctcacaaccttgcctgcacagtagaatccctggaaagttttaaaaagcatcaatgcctaggatgcaccacagaggttctgatttaattggtctaggatgcagctttggcattgggattttattttgttttatttattttattttattgtttgagatggagttctgctctgtcacccagcctggagtgcaatggtgtgatctcagctcactgcaaccttcgcctcctaggttcaagcaattctcctgcctcaacttcctgagtagctgggattacaggtgcccaacactatgcccacctaattttggtatttttagtagagattgggttttaccatgttggccaggctggtggtgaactcctgacctcaggtgatccacccacctcccaaagtgctgggattacaggcgtgaaccactgcccctggccggcatggggatgttaaaagcttctcaggtaattctcctgtgcagtctgggtgcgagtgacagttttacatctcaagtccatgaccttagggacaatcaactgggtcccaggaactctaattgaatcccaggacttctgtgttcaatgtagcctccaaagttatcctttaggttggctgtggtggctcacacctgtaatcccagcactgtgagaggccaaggtgggtggatcgcttgaggtcaggtgttcgagactagcctggccaacatggcaaaaccctgtctgtactaaaaatataaaaattagccaggtgtggtggggggtgcctgtaatcccagctactcgggatgctgaggcaggagaatcgcatgaacccgggaggcagaagttgcagtgagccaagatcatgccactgcactccaacttgggcaacagaacaagactccctcttacaaaaacaaaacaaaacaaaaaaccacatgacaacaaagtgatccttcgaagtgtaaattaggccgtaaccttcttctcttcaaaattctctgttggctccccatgtccctttaagtaacagtcaaagcccttgtgtctcctgcaaagtccatatgacgggcttcccatgatgtctgggacccatcttccatgcccctctgcctgcttgctccctgggatccagccgcccgtgcctcctggccttcccttgaataccccaggctcagccttgacttggagcttttgcactgggtctttctcctgcttcctcctgtctggggaatggtcttcccccagaaatacacgtggccaactctctcctctccttcacaccattgctcacatattatcttctcagtgaggctttctctggtcctctcccagccctggtgcccctttacccagctctccattttccagcgtacttgtctccttccaacgtactatatgatgtactttctagcaatgtctgtttgttagcacctgtctctcctgctagagatgtgtctactttgtttgctgatgtattcctggtgcctaggatgtgcccgacatgaaatgtgttctgaaaatatttaataaatacatgaaaatctggagagtcctaattaagacagatttctcagtaaatgaagatgatgattttagatgtttaatgtcccacatccagattctaacgagaataacaacaggactatagtaagagtgataaccaacaccttccttggaaaatagggaagaggtgtgctacagaaaggtcagaaactgcaaggaattcctactaaaaatagcaggagcctaggcgtggtggctcatgcctgtaattccagctactggggagaatgaggcaagagcatctcttcagctcaggagttcgcggctgcagtgagctatgcttgtaccactgcattccagcctgggagacaggatgagactcccatctcaaaaaaaatacagtaagtaaatgacaggtcaaaaaatgaagaaaagacccaaaagaaatgcgcacctgcttgtctgagaaagcaggaggtgtcaggagactagaagagactatggcagatccatttacacttctgcattgtaagtattgagaatggagctgtgggcaggtcatgcgattgacgtgaactccttgttctttagctgttatgggtcaacactgtgggacgtagctgctcagagaggttcaagtgtgagtacagtagtgcctccttatattcgggggatacattccaaggcccccactgcatacctgaaactgtggatagtactgaaccctgtacatacatacctacgataaggcttaatttataatttagtcacatagttagggattaaaaacaataactaataataaaccaaaaaaaacaaaataagtaaaacaagggctgccgggctcagtggctcatgcctgtaatcccagcactttgagaggttgaggtgagtggatcacctgaggtcatgagttcgagaccagcctggccaacatggtgaaaacccatttctactaaaaatacaaaaaaattagccaggcttggtggtgggcacctgtaatcccagctactcagaaggctgaaacaggagaatcgcttgaacttgggaggtggaggttgcagtgagcccagatcgcaccactgcactctaggctgggtgacggagtgaaaccccatctcaaaaaattaaaaaataaaaaataaaaataaattttaaaaaataaggactacttgaatacaagctctggaataccaagacagtggatatactaacctataagtgactaatgggtgcacagtgtctacagcctggatataccggacaaaggaatgattcacgtcccagacaggactgagcatgatgacatgagattttatcagctactcagaactccacactatttaaaagttatgaattgtttatttccggaattgttcatttaatattttcagaccaaggttgaccctgggtaactgatactgtggaaagcaaaatcttagataagggggaacaactgtaataacagctgcaaatacgaaaccccaggcatggagggctcccagcacggacatgattcttcccaaggtagtggaccggacctcggggctgggaagcagtggtattccacattggacgtggaggcagatctaaagggaaaactccatatggaaagctaatcctcagtgtttggcttaagcaaacacagaaaaggaactgtagcaaattgaaattttcctgctatgatcatctcccaggatgctttctgctcctctccagtcgctgtagaactaaactggtttgtaaacttctgtcaacccatctttcagtttcagatctgaatgtatccaggtggacagggagggatgagggggagaatcagctcacactgtttggggcatttacctagtttggtagacttcttcttgttttagcttgaataatgtgaccaaaaaaaggtacctatgaaaagactctgcattatttaagcaaaagaatatggcagttataacatacttaaaatatactgcattatttaccatgtgctttcagttaaattcagaaaaaaataaactctgtaaaatgaaggaaaagatgtgaaaatgagcaaacagactgaaatgaaatggaggttcctgaattactaaaatcctgtaaataaatagatagaaccacagtgcaggtgaaaatgacattataggcattaaatggcaaaagtgataccagaaaaaaaaaaaaaacaaatgaaggatacagaaggaaaacacgataagctccaacagggcagaattttcttttttagctatgaagatagacgttctgagagtcaggatgagagagacatggaggagataagcgaaatattgaaatattcatttaaatacgaaatattcaaatatccaaatatccagatttaaaatataggaagaaatagtgaacaaaaaaatatataccattgatattcccccaaaaaagagacaagaaaaataaaactgaatacattatcaaggatataatagtataaatgtattttggatttaacaaagacattaatctgaagattcatatggctttacatttacaataccattgatgaggttcatgaaaagtgattagtttttgcacataaattttgtaaaatatttttatttcaaaggaaaagaaaaactccataaaggacagaaaagccaactaaaacagaagaaagatcaggctgttttcttacttgtgctctgcagtgttaggagtgaaagtatgatgaaactggcaaatttgatgtccagagaaaaaacttttgctacagaaaactttaaaatgtggcacacagtccaaggcacaaaagcaggacaggagacaaaacctaggtgtgcactagctgggtggtctgatcagaagcagctatacatagaaccctagaagtgaacgagggaagaaacacactccacagaggaaataaaatatccttgtggcttgtcttaggctctagttggaataaaaagaagaaaggttttactaagaatttctaatataaatcattgcatgagtttgggactgaaatttatactacctgtgtggactgaaaatctccatgaaattttattttaaagtgatttcaaattggcaatcctcacatgtctaggagaactaaactaaatcttctttggaagaccactttaacttcagatttcaaaaaactccaatagataaaaattcctgataatatgtatccataatcagaaattacaaatcacatgaggcaacatgcctgccatagcaaaactcagcaaaaaaaaaaaaactacagaattatcacaaaacctatagctaccacaatgataaaattcagaatattttaaagtatgtttattataattaaataaagagtttccaaagtgtgattatggaactagaaactatgaaaaatgaccaggaaacttttgaaaaagaatgataaaatccctaggacttaaaaaaaactcaaggcccaggataaacagacatagaaaatagagtaggaaagtctaacatgtcttttcagagttctagaataaacacattgagagaattggggaaaaggtaatatttgaagataaagtggctgcaaatttctgaaattgattaaaaaatactaattgtcagattcagaaagcacaacttctcccaaactgaataaatctacagctgcaaaaccctcagggcaaaaagtggacagaaaatgaagaggaatgatgcatattaatgataatttctctggaaatggaaatatgaacagcaatgctagaagctagaaaataaaacaataccttcaaaattttgaaaaaatattactctaaacctggagttgccaggtgtaaaattatatcttgcaagaatgaagttgaaatacatatatatcaacaagaaaaaattgtagagtttaaaaagaataggctcttaaaaaggaaacttctaaagtccattgtttgtaattcagaaaaaaaaaatctgaggtgtaggaaagaatggtgagcaaagaaaattatacacatgtgggtagaactaattaaataatacaatgtaaaacaaatattatgatttataaagtgtacagtacaaactgagtaaaaataaaatattgggcaaaaacagcatatatcagtgtcaggtgttaaatattctaagctgattctattaatctgaaagagggaaaatctattaatgaactagaaaactgaaaaacagaagattagaccaatcacctacatttaaaataccgaaaaagatagaaaaacagtgaaaaacaacaaaaacccccaaaattaaatgatagaaatattatcaattataataatctgcacaataaatgtaaatgaattatactttctaggtgaagaacaaaggtttttagactccaatttaagaaaaatattctgtttacaagaggaacacctaaaatattcagtcacaaaagtttgaaagtaaaaaaatgaagacaggtatacagaataaaaaccaacgagccaaaaggaagctagtgtagcaatatcaacgctatacaaacttagtaattcaaaatgaactactgaatataaagtatatcacaccgtattgtgccccaaacttctatgaatttaatgcatagctttacaatatgcaaatgaaacaatgaatattactgaagcagaacaaataaatccatcatcttgcagaagattttagcacatctttttcagtaaattatagaacaggtagaagacaaatgattgaatatatagaaaatttaatccataaactaacaaacttaattaataggtaatataaaataacattcttaaattcagaaaaattctttccaaggatacgtggaatatttattaaaatgaaacacatgcagtaagacaaaaatttcaaagaactgatttcatactgaacacaacatggttaatttggaaattaaaatgagttttagaatctcagacatggaaatttaaaaatgtatctccaggtagcttattatatctattaattagaaattagtaattaataatgttaaaaatactttggtttatacacacacacatatgtatttataataactcttggaaagccaagaaagttgcatctaaaaaatttataccatttacattggaaaagaggcaaatgttaaaatagaatagaaattaataaaataaaaagtattatgctagagaaactgagcaaagctaatatttggttgttttaaaagaataataaaatagaccaactctggcaagatatattatgaaaacatcatagaaagaaagcacaaatacaattattttgagaatgaaaaaagcaaaaaggttaaactgtgatttaaagaaagtagtttattttttcaactttatgacaatatatgcaacatttaattgaaatggacaaattcttaaaaaaaaaaatcaactaatctgaccaaaggagaaatctttaatttctagagtcctatagccattgaataccatgcatcagtagttaaaaaaataaattaattaaaaaaaaactttccactatgaaacactaggcacagatgattttatagatacattataccaatgaagaaataatcctaaaccttcacaaacactttaaagcaaaacaaaacaaaacaaaaaaacaagagggtacaattcccaaattatgttatatggctaccacaacacagatatatcatagctagactaggacaatgtatgaaaaaagttacaggctaatcttactcattagtatggagcagaaacctatatcccttcagctaatgacttgtgaaaagataacatgcaatgaccaagtttgttttatttcaggaaggcaaagtaaatacaaaaattgtgaaacttataaaagttgttcatcatattacattgagaagatcatgttaaactcttttattctgattactgttttctaattctaattttaattttcttaatgtttgtttcttatattttgcaggtacgtttttatgtgcattcacatttagaatggaggagtacattcacttggatttatccctttttcattatgaaatatatctctttgtttttagcaatgtttgttctaaagtctactctatctgatattgctatgactgcactagcttttcttggttagggtttgcatggtatgtcttttctcatcctttcatttttaacaactctgtgttcttacgccccaacttgtgagtcttaaacaggatatagcttggttttgtctttatactcaggctgccaatctttgcttcttggagcatttactcatttatatgtaatgtaattactgttatattgtgtttattgtcctccatttttttttctgtttctacttgacccacttgtttcatattctttggcctctcctgtcttgacttcttttaaatcaatcagacttttcattattctcattctttcctttattaatttattgttatttgttattttattattcttttagtttttaccctaaagattacatcatttattgatgtgttaatgtctaaaataagttattgcctttccacttctctgattatgctcaaaatctgagacattctaagtccacttaaatgggtatattccattatacccatctaatgagttctaatcttaatgtattttaagtttttctaatttccattcatttcttcttttgattatatatatatatttgcttcttcttttgcagtcttgctgtcatatattttaattttccatgtttcaaacctcatattattaataccattatcttttttttttttttttttttttgagatggagtctcgccctgtctcctaggctggagtgcagtggtgtgatctcagctcactgcaagctccgcctcctgggttcatgcgattctcccacctcagcctcccgagtagctgggactacaggcgcccgccaccatgcctagctaattttttgtatttttagtagagacggggtttcaccatttacaggatggtctcggtctcctgacctcatgatccgcctgcctccattatctttttatacagttgatttcagtccatgtacatatatagtcactgctttgctttcttttccttctttcaattctgtgattccctgcagaattttttttgtattagactcaactatatgaacttgctattattcatcagttttcatcaacacaagcatcactatcatatagttcaacctaatattaccttaacgcatttgtctgaataacctgtgtaacttttataagatggagtcttgctttgttgctcagatggagtgcagtgattattcacaggtgctatggtagtgctacagctgcaaactgctggattaaaaagattctccttcctcagctttctgagtaactgggactgcaaggcatccactactgcacctggctgtgagactcgtgtctgttttttattttgtctcttggtcatgtggccctgaattttggtgtgtgtactactttctttaaatacattgttaagtacacaaagcacacaaatgttaatgcgtaccttgatgcctttttagatatgtgtatccctgtgtaatttccatctagatcaagggatacagcatttttagcagttcaataggttccctcatgccctctgccaattattatctctccaagaatagttgggggagttatacttgttttcaatttcatgtgaatgaaatcgtggagttgatgtttcttcccttaactttatgtccatgagttcatcaatgctgtgtctatcaggattttgtttcttttcgttgttgagtagcattccattgcaaaaattgaattttttatacagttgaaatttatttatacaattaaaaatttttaaacagttgaaatttttttcaaatatatttatccgttctactatttatggacacatttttcatcatggtggttttataaagaatgtagctataaacattctggtgcatgtcttttggtggacatgaacacccactttgggagaagatttatatactggtaattacagttattagatgataatatgtatgtatattttgatttagtaggtattcctaaatagttttacagaatgattgtgccaatttatattcttattagcaatttaagagaatttcagctgttctccatcctcccaaacacctggtaatgtgagtcttttaaatttagtctttcttgtaagtatatagcagtgtctcatgagctttatttgtatttctctgatgcttgaacactttttcatatgtttattggcgatttcaaaatcctctgttgtgctggacaacaaggtgaaacctcgtttctactaaaaatacaaaaaattagccgagtgtggtggcacatgtctgcagtcccagctgcccgaagggctgaggtgggaggatcacatgagcctgggagttctaggctgcagtgagctgtgatcttgccactgcactctagcctggaccacatagtgagtgagaccttatctaaaaaaaaatccaatcctatattgtgaagtgcctgttcatatttctttcttatttttgttagggtcatcaaaatttttctaatttatttgtagaaacattttttttaatactctgaatttgagtttacagttgaaggtttgtactggaaatatctctttcatgtttatggcttatctgtttattctcttaaaggtgtcttttaatgaaaagggattcttaattttgattaaatcattatagaaatcttttatagttggtatatttttaatcttgataaacaaatgtttgccttattcaaagataattaaagatcttttcctactatgtgtctcctagaaaactaatttatttttattatcatatttagttcattggttcatcttgaattaatttttttgtatagtatgaaatgggggttgtattagccaggaatctccagataaaccctaccaataggatagacagatacatacatacacacatagtaaagtttattgtaaggaattggctcatgccattatagagactgagaagttccaaaatttgtagtcagcaagtagagatccaagagcactgatggtgtagttccaataaggagccagcaggcttgagacttgaggataaccagtgtttcagtttgagtctaaaggctggaaaaaaccaacattccagcctaagtctgtcaggcagaagaaatttcctctaactcaagggagggtcagcctttcgttctatctatctaggcttttaattgactggaggagagacaccgacattaggaagtgtaatcggtttccctcattctaccaattcaaatgttagcctcaaccaaaaactccatcacagacaccccgagaacaatgtttgaccaattatctgggcaccccatggcccaatccagttgatacacaaagttaaccatcataaaggtcaaggttggcttttatctttgtgtgtgcgtgtgtgtgtgtgtatgtgtgtgtgtatacgtatacattgttgtttttcatcatggtgaatatggcacaaagctatttggtatatcagataaatacaaaagaaagctcagtaagacacttctctatacctatatgtatacacatacacacacatatgtgtgtatatccatatatatgtatgtgtgtatatgtgtgtatacgcacacacgtatatatttgacctatcaccatttcaaaaaatgaccatcctatttccactgaatgttgtgtgtatcctttgtcattaatgatatgtctgtataaggtggttgttaacacaatcaataatgttgactgaaaatatagctatatacatatgtttgtattttaaaatattttctatttttactaaagtaataaatgtgtatagtttaaaaattatgccgtattaaataattctgcttcactcctttattctctcctacttctacttcctataagtgatggcttttcatattttttctattctaattaatacttatgttgctacttcttgatttatgaatgtttcatattatatactgatttcttgttttattagctacattttttgtttttacatatctacccccatttcccttcctctatctaatcaatatatctatattaccatttgtgagtaaatcattaattaatgtttatattaatatgaccatattgttttctgactagacaagcagtgtacagtaattgttttgtacaactttttgcttttttggcactgacaattgctttgttttataatttaattagtgttctatgtatggggagccatttctccctaagcgctccaaagacctgtcaaatacctgtcagtaattttccaagtgttcagacacattttcaagcacctatatgcatcccacccgagagacttccctcatataaaccttagtgaacttggtctcccagcttacagtgttacagcagagaagcagagtttttatctcatttcctattcctttgtatatagccagtttgcatttttgattgtttttcctcttggaatctcttaggatctactttttatccctggtgttctgaaattgtgtgatgctgcgtgtggctggcataggtcttttcaatttaatttaattaactttttgcacatttccccgtacgcttcatgggctcaatctggccattactcagcaattactcggcactatttatttgatgatattcttcccacagttttctcccactggtcaggtgtgggagctcctggatagatctaacaggcttttccctttctctctccttacattcatctctttatcactttagttctactatctattttaatctcttccatctattgtctgttcctccaagttcttttctatttgcttatttgctttattttaaaaattttatttaattaatttttttaagagacagggtctcactctgttgcacaggctggagtgcagtggtacgatcatgccttattgcagtctccaactccgaggctcaattgatcctcccgcttcagcctcctgtgcagttgggactgcagcacatgccactacacccgactaattttattttttattattctgtagagatggagtcttgctatgttgccctggctggtctcaaacttctggtctcaagctatcctccttcctggggctcccaaagtgctgggattacaggtgtgagccactatgcgtggccggctttaattcttgtgcccctttttgtcttggtctatgcctttcatgtcgagtcttttctctcaggtattgggactttgggctgctcactcatacttaggagcaagactttaagctcattggaagctctgggtatctgcaccagctatccgcagtggacctccaccacgatgcagttagacggccagcttttttgtctctctggtacacataccctctaaagacaggccttataagcctctttattggtgaccacttggtttctcttgaaaataatcctgcaatctccccacctagtggtaggggttatgccaaatggctgactcctgggaacagggcaaggaagagaggtggggtgtgagcattctggatgtaaacttatttattccttttgtggtttccccacatctgcagcctctcaattccaaagataataaaactcctatttcctgcagagataggaatggatatttccatggccacacatggaagacaaggagattggaaaagacatgggggtggcacctaactgctcagtacagatgtgcaaccttggaaactggtgcccccaagtccaaaacctccccagagtcccatggggaaaattaatttgtttttaactgtgactacctctgtaggcacaaatatttctgttttcttagcccttctgactcatttacccccattctgttttctatctttgaaatctaacttacatctatgaacactgttgattcatcctctattatctttatctttatgggctattattacttcagttactttactattgcaccaatagagttttgggagagtaaaacaattcttatttatatctaaatctctttacacacatgcaaacacacacataattattcccaaaataagcagagaatgctagttaaaaataaaacttctactttcacaaagattaacacaaagaaaatctcaaccaactataaaatgtaaaaatacaagcccatattctgtgattaaaatacaataaaatgcatagcaaaataataatcctatccacttgtcaataacagcaactgttactagccccactattattattattaatattattattactactagtagtaaataactcctggaataaagaggaattcaaaataacttataaactctttaaaaatgaacagtaatgaaaacatcacatgtaaagatctgtgaatactcacatgaatatgtatagtctaacacacatatcagaaaataaggaagataaaagaataaacctaaaaaataaaaaaaaaaagccataaacctaaaactcaagaaactagaaaactggtgaaaaaataaactgaaattctatgtgactatttcataaagataatgggaacaattactaaaatagaagtttaaacaaataaaccaaaactcagaaaggttgcttaataagattaataaaaataaaatttttcacaagcctaatcaagaagaataaagaaggaaaaagtaaacaacattagaaaaaatggggtagatgcataaagattaagaacattatgaaaagttatgtgtaatctacacacggctttatggtaacaaaggtgaacatttaaaccagtttttttaaagataataaaagtggaaaaaaatcaactaaagataggatcgactacctaaatatactaacaaccatagaataaaatgaaagggactcacatagcaatccctaaaaatgttaacaggatcagatggctttatgggtaagttctaccaaattctttttttttttttttttttttttttttttgtgacagagttttgctctgtcgcccaggctggagtgcagtggcccaatctcggttcgctgcaagctccgcctcccaggttcacacgattctcctgcctcagcctcccgagttgctgggactacaggcgtctgccaccacacccggctatttttttgtatttttagtagagacggggtttcaccatgttagccaggatggtctctatctcctgacctcgtgatccgcccacctcagcctgccaaagtgctgggattacaggcgtgagccacagcgcccggcctattctaccaaattcttattgaataaaaatgatactatatatcctatcaactgtttcagaccagaagaataaaaatggaaagctcctcaactaattctagaatcccagttcaacttcacacctaaaccaaataaagagctttctacaacagacaacaaatcaaggaaaaggaaagaaaaaaaaaactagccatgcttacatttgaacatatactcaaagatactcaaagaaacaatgcagatattattgtaacaataatataaacaatagcaagctttgacccactatggttaactcaggaagatagaatggattcaacattagcgaatctatcttataattaactaacttaaaagattgaacagaaaaaaatgtgataatcacaaaagatgatagattttaatatccattcttattaaaattattagcaagctagttataacgaggaagatacttgttaaagaattaagaattacagcaaatattttaaaatagtaaaatattagaagtctttctgtttaagtcagaaaaaagaatgctaacactccctgcaacttttcgcattcttctcaaggttttagccagacaacaaaaagtaagagatgtaaaactgaaaaagaaaagaaagattgcctctaaatagttgacttaatacatgagtgtggtatgagattaaagtaaaaagttcaccatactaataactttcctcagctccagccatcgccaagtagaagataattaaaaaaagatgctaatctgaaaagaacccaaataataattaactaaattcctaggaaaaatacctttcttttcaaagttttcttaggtgatcttatttgagtgtcaggctaatgtactgaactatttatttgggtatgtgtgtgttagtttgtgtgtgtgtattcgtatgtgtgtattggtttgtgtgtatttgcactggtttgcgtgtgtgtgtgttggtttgtgtgtatgtgtgtaacggtttgtgcgtatgtgtgtagtggtttgtgtgtgtgtattggtttgtgtgtattggtttttgtgtatattggtttatgtgtatatattggtttgtgtgtgtattggtttgtgtttgcattggtttgtgtgtgttgtgtgtatgtgtgtagtggtttgtgtgtgtgtattggtttgtgtttgcactggtttgtgtgtgttgtgtgtatgtgtgtagtggtttgtgtgtgtgtattggtttgtgtgtatgtgtgtagtggtttgtgtgtatgtgtgtattggtttgtgtgtgtgtattggtttgtgtgtgtattggtttgtgtttgtattggtttttgtgtgtgtatgtgtgtagtggtttgtgtgtgcatattggtttgtgcatatgtgtgtagtggtttgtgtttgtgtattggtttgtgtatgtgtgtattggtttgtgtgtatgtgtagtggtgtgtgtgtatgtgtatttgtatgtgtatgtgtgtattggtttgtatatgtgtgtatttctatgtgtatgtgtgtattggtttgtatatgtgtgtatttgtgtgtgtgtattggtttgtgtatgtgtattggtttgtatatgtgtgtatttctatgtgcatgtgtgtgttggtttgtgtatgtgtgtattggtttgtgtgtatgtgtagtggtgtgtgtgtatgtgtatttgtatgtgtgtattggttggtatatgtgtgttggtttgtgtatgtgtgtattggtatgtatatgtgtgtatttgtgtgtgtgtattggtttgtgtatgtgtattggtttgtatatgtgtgtatttctatgtgtatgtgtgtactggtttgtgtatgtgtgttggtttgcgcgtgtgtgtatttctcttttactcttcctctgccatcccatgaaagtgggccttttcctgtactaactcaagacaggtactgcgcccagggctgaaaagggagctgtctgcgttcttccctgctttttcaggagctcacggaagaggccatgctacccaccaggggcaaacaccaaagaagagaaaggggtctttgaagatgacaggaaggtaagaggacatgccttctgttgttctgaggaggaggtcagagtccaaagacagcaaggacacaacagggcttcacctgtgggttgtggggaggcctccggatgatggctcgtgcctcacctatgaaggcagggccctggggtgctgatttccagcctccacaaaggctgggcatggacgtgagagtgacctaacttaaagggacattccgggtttgggaaggagcatagctggggcgacttggatagccttaagggtcagaggcccctcatctcttttcgctgttggacgctaaagaaggcaggatggctggtggtaaagaatcgaatctgaagtcagccatgtgctgagggcaacaagatatggagcggaagcccatgcccttgtggacaacacgaggccgccatgacaccaatcagggccaacgctgggaagagaatcaacgtccactttgttttaggtgtcattttttctttcccgtttcaggtagtccattccaaccctaaatgatgaactctgtgaggctcagtttcctcttctgtaaactgcagacaatcctcatagcatccctgtgaaaatggaaaagctaagatgtccagtgtgcttggcacagttgctaacatgtcataaacaccccaaacgtgtcaggtattattattgttactgttgttgtcttgaataacatcgaatcaaaatatatgctgaaatcctatgagaaatataaagataaatagaaagaagcatagcactggtggtagatgataattgcatttttctgatttgataccatattttattcttagctcacttaatatatcaaagtcagaggagcctattgataaaattgatttaatagtaatatatcaaaccttgcagagataatgcttgtttttttctagtgcccatggaatatttacagtaataattacattcaccctctaaaagatctgaataaattctttaaaatgtaatgcctgtattgtctaattgccatacaaactatatataaataatagaatttaaatgagaaacttcttgaaatttaataaacccttctatgtatctcagtaaaaggtggcacacaactataaatatagactatttgtaaaataatgagacaacataagacaatgtatgagctgcagccaaagctgtacttattattacaataataatcttaaatatttttcatattgagcaagacaaaaataaatacactgaccattacattcaacaaatcagcaacaaaatggggaagcataagaaaagtgggaggaaggaattaacagaaataacaagaataaatatgcattcagcagaattgctataaatgagattggtttctctgaaatgacaaataaaatattcaaacccaagaaatctaatcaagaaaaaatgagaccaaaataggattgagaataaatatataatcacaaatacaaagaggatttatagacttttcagagatttctgtgaacaactctgctaaaaatggaaattgcataaaattgatcacattctgggaaaaatgcatttaaagcggcttatgaaaatctagaaaatacaaataaaccagagactcttaaaaaaataaaggattgtaaaagaactatgtgtttgtttctatgtgtatgtgtgtatcagttctataaggatgctgggaccagagggttttacaggcaaggtctatcaatcctctaaggaaaaggtaaattcactgtattttaactattatagagaactgaaaagttggaaaggttactctctctgtctctctctgtcacacacacacacagaaatttaaaatgaagagaatatattctgaaaaagaggaaatactgtattttggataacatataacttacctggaaaattcaacaaaatcaacagaaaaactgcttgaattaattagagagctaaggagagtggaatattaaataatgtaatataaaaataatcactattagagataaccagttgatacatttaatttagaaaattcctatttattacaacatccctaaacagagattgttcagaaataaattcaacaagaaatgtgcaggacctatatgtggaaaacaatcctacaaaattttacccagggctgcacaggtcaacactccaggacggacagggtggcaagtcctaggctcaaggacagagatgctgatatcggagcactgggttgtgatttgaagattcacgtgttgaatacaggtctttttcatgactgggtatctactcaaaggaaaagaaattgttctactattaataaaaagacactggcatgcacatgtttattgcaacactaatcacaatagcaaggacatgaaatcaacctatgtgtccattatgggtggattggataaaagaaagtgtggtacatatacatcatggaatactacacaaccataaagacaaatcaaataatgtcttttacagcaatttgtgtggagctggaggcaatgattctaggtgaagtaactcaggaatggaaaaccgaataccacatgttctcacttacaagtgggagctaaatattttgtccaaatggacataaagatgggaacaatagacactgaggaccccaaaaagggagcaggaagggaggagggaggggagcaagggcggaaaaactattgagtcccacgctcactacctgggcaatgggatcaatagaagcccaaatctcagaatcaggcaatacacccatgtacctaccacacatgcacatgtaccccctgaatctaaaatttataaaaagcaagaaaaaataaatataaatacaacctagacactattaaaaaaaaaaaaacaaaagaaagaaacatgtctttttttttttttttttttttttttttttttgttgagacagagtttcactcttgttgcccaggctggagtgcagtggcacgatctcggctcaccacaacctccgcctcccaggttcaaacgattctcctgtctcagcctcctgagtagctaggattacaggcatgctccaccaagcctggctaatttcatatttttagtagagacgaggttactccatgttggtcaggctggtctcgaacttccaacctcaggtgatccgcccaccttggcttcccaaagtgccgagattacaggcatgagccaccatgccctgccgaaaacatgtctttttcaagtctttgggagacttttaataaagagattagtgagaaatttccagaagcctggagagatgtaaatgaagtgaagctgatgaggaacgaccctgtgttgggaagaaaggtcctccctggtttagattagataccccacccccctccactgaggacctgagtaagcagggtcctgccttgatgggggcacacgtggtgaagctaggagagaaagcaagttctcttcctatgggggtatctgcacgtgcacacctcctttttccatgatcgccagcctgagaaggaccctgtctccaaccttcccactgtttacttccaacatggggagcttccttgacctcccagaagcaccatccgaggtctcagactctggaattaacttgcagctcaagagagcttactgactgcatgttgtacgtggggacctgcttcacagagggcgatgttgtcctgggcctctgtcccagaacctccagcttgacccttaggcttaaagttgttgttgtttttgttttctttcaatagcttttggggtacaagtggtttttggtcacatggatgccttctatactgatgaattctgaattttagtgcacccatcacctgaacagtgtatgttgtacccaatatgtagtcttttattactcaagcccctccaacttccccaactcccaagttcccaaagtccattatatcactgtatgactttgagtcctcatagcttagcttccacttgtaagtgaaaacatgtggtatttggttttccattcatgagttacttcatttagaataatggccttcagctccatccaagttgctgcaaaatacattattttattcctttttatagttgagtagtattccatggtgtatatctaccacattttctttatccactcattggttatcttagatctcagacctgaaactgtaaaaattctaaagataatgttggaaaaactcttctggacatccaggcaaaaaaattcgtaactaagaccccaaaagcaaatgcaacaaaaacaaaaataaataaatgggacctaatgaaactaaaaaacttctgcacagcagaagaaataataggcagagtaaacagacaaatcaggctgaaagataaaggagaaggcaggtggctttttcatttgccaagggtctcagaagacagtcggcccagttgattgacagtcagtccagttgattgacctcccactgtccacattaactgatttcctaggtaatttctaaatactcacctcacttttctacagactgggtttgctgggatcataccagggtggactaggaaagtttgagtcttcactctcatcagtttccttcctgaccccacccccaagccactttaaataaagataagatctaagtagaaaatcatgcactcgctatgaacacccagcttcaagagaagtgccctaaatgcctccggtagagaaaacctcagtgcgtcgtatgcttgtttccatatgcaaatgaaggcttcaccaacttccacccctctttgctgcctggcatatcgtgattggcagggctgtacttcctaccctccatatgcaaatacacctcatattcactaacgcacagttttaaccccaccccacaggtgggaggtcgcaaaagcaaaggatttttttttctagttcttgtcaatcaaccagccaagctagtttatttaattttatacactagctcaaagtcacagccagtgtctgaaaggcctgaggggtttctcagaggtatcctaatttcgtgcaaccagctcctgactttcatctgcaccaaggtgggcagtcaagatgaatgagtgaatagaaatatgacacaggaaggccctgaatagactcagtggtcaggagacattaatcttgacgtgtgtgatctactttcgcagaggagctgaagtcaccctttctgcccaccacacctcatttatttggttaatctcccataacttgggccttatgattaaccctgtaagtaagctctgctctggtgggtctttgcccctctgagtttccaaaatggcatagattattgaaatctctcctctgacccattcatagacatcagccttcacgccatctggggctgcccctctcctttgtgactttgaccttaaacagcccagtcctataaataccaccactgaggtcaatgccaggtgcaaagagcatgctttggtgtgcaatccctcagcacctagttggtgccaggccctgagggatgtgctgttgggagtgtagagatgatttatgctcagagaaaggagaccttcactctttaacctggcgaggcgtgttctgcaattgaggaatattcctcagaaggacggcaggtggaagcttgctgctggcttgtggaggcggaggtgattgagcagcctcgcttagcagacaggcatttgtcaggcgggaaaaacaagggtagagtggaatcacaagtccgatgtgatgacaactttagtgtgagggaaagagcatccagaaaggctgttttgagatgttaacctgggtcattcctctctcctaactgaataaggcacaaaaacagtagctgctgcatttaccattgtgcagaaatttcagatgcaacatcttatcattggttccatgattcttgatgccctcaaccacactgaggattttaaaaaaggttaagagaatggagacagggagagaatctgttagatggatttctctggaaaaagttggatatgggtcctacatccctccccacaacctcacctcaagacagaaaggaagtgcttcaaaagggttgcttggggaagttggtgtgtgccctgcagccaggaggacacgggtgcttgtggctgcctccacttgggagacccggaggtggctgatttgtcagcagaacaagagagagacagttttagcagccttgggacagcctgctccccagagttcacaggaatgcctcccactggctgtgcaggaatcaatgccttcttgcagggcacagccactcccacagagagactccctggggatgggccaccgggaactcagggactgaggccatggtgaagggcattacctacttcccggacaaatttttcaaagtgcaacccacaaaagcagccctcaagagcctgtgtcactttaaacaatctgccagtcaagtgagaatctcactaaactctccagtctccctctcccgtgctccaactgcccaggaccaagaaacattcgcttggaagtgggaaaagaggggagcatgaaggcaggcttccctggcttccccggcagcccatctgccagggagaggtcccagctgtgcaggtggtgctggtgaatgggagaagtcaaatttgtagagaaagttggaaactgactactacgtaagactggcttttaaaaccactcagttggcacttccatgagttcagactattgtaagaattttctattctcgagtgacttggaaagtcatggaggctcgtctaagtttgcactcaggagataaagaagaaataacccagcaagcaggcttacaggacagaaggaaggaagtattgcataccatgcctctgtttgtttcacacactggggacagcacttaggctttgaatgagtgggtctcaaaggccaggggttgcgggggtatgcacactttccatgggtgcctgtattagttcgtcttcacactgctgatgaagacatatccaagcctggataatttataaagaaaaagaggtctagtggacttacagttacacattgctggggaggcctcacaatcctggcagaaggcaaaaagcacatcttacatggtggcagacaagagggagtatgagagccaagtgaaaagggaaactcattataaaaccatcagatctcgtgagacttattcactacaatgagaacagtatgggggaacccgcccccatcattcaattatttcccactgggtctctcccacaacacgtgggaatcatgggagctacaattcaagatgagatttggggggagacacagccaaaccatatcagtgccccaaacttaatgattacaaaacctagaacactccaaggtgctaaagacacagttcatattactgtagaaagtgagataagtaaacttcacttccaaaccccctcctccagcattttactgcaagcaatggtagaaacatatagaaatggagaagtcatttttcaacattgttatgtagttttctaaattctaatgactgcataatagtctacttaaccaatctctgatggatggacattaggttacttccaatttttcaccattagaaacaacgctatgatgaatattcttatgcataaatctttgtggtttcctctgattatatcctgtggtgaaaacagaaaaagtggtactactgaactaaaggagggaaaaattgtaaggcttttgaacataacgctggtgtcccccaaaccttctaccaatttatattttcatactttcaccttagttctaagtttctactcaatggacaagaaatattttaaagtcttttctaatctgataaaagcttactggtaggtttttaatttgtattcctttgaaatctagtgagaataaattttcagccaggcacggtggctcacgcctataaatccaacactttgggaggctgaggcaggtggatcacttggggtcaggagttcgagaccaacctggccaacatggtgaaaccctatctctactaaaaacacaaacattagccaggcatggtggcatgcacctgcaatcccagctactcaggaggctgagtaaggagaatagcttaaacccgggaggcagaggctgccatgagccaagatcacgccactgcactgtagcctgagtgacagagcaagactccatctcaaaaaaaaaaaaaaaaaattctaggttaaccaaatgtatttcctcttttacaactttcctttgtagtttccttgttttattttatttcaattgaaaatgactgtatataattatgggatacaatgtgatattttgttacatgtatacactgtagaaagatcaaatcagcctaagtaacatatacatcacctgaaatatttatgaattttttctgtggtgagaaaatttaaaattttctattttagttatttacaagacattgttattaactatagtcagcttgctgtgcaatttatcaccagaacttattctttctacctaggtgaaactttagaacctttgaccaacatcttccctttccctacctgcctcacccccattccctggcaactaccattctactctctacttctacaagtttgaccttttcatttatttatttttatttttatttatttattttgagataggatctcactctgtcacccaggctggagtgcagtggtgtgatcttggctcactgcaacctccacctcccaggttcaagcgattactcctgcctcggcctcctgagtagagttacagacatgtgctaccatgcctggctaatttttgtatttttagtagagatggggtttcaccatgttgggccaggttggtctcgaactcctgacctcaagtgacccacacgcctcggcctcccaaagtgctgggattatagtcctgagccattgtacccggccaagtttgactttcttagattccacatataaatgagatcatgctgtatttgtctccctgtgcctggtttatatcacttagtgtaaagtcctctaggtttgtctatgtgtcgtttacaacttttcatgtattatctttcatttgtatatatttttgtgttctttatctttttcatatctgtttatatgttctttacataataaaggcattgactgcttgtcttatttgatgtaaatttcaactacagttagctgtttaccttttagtagtgatttttgatacttgggtcttttaaatagtatgtagcaaaatctataaatctttttctataagatttattctactaaggttttgtaacaacagagaaaaatgtctatgttataattttaggttaaaagacaaggtacaaatttatatttacagtatgattagagctatatcacacacacacacacacgtgcacacacacgcaccccaaattaaaaccaaagtcctaatagcaaaatcaagaagtctgtcaaaattcaacaatggcttaagttgatagttggccatgtagatattttttctttttatttctattttctacataacttctgtcttgtatatggagacacaaatattagaagtgaatcttattccacaaacccaagtgtgcaagaaatgtcaaaatgtttttattaaatcaagataaatctgacttgaattaccatctagcagggctgtcagcagattttagcccacctattttgtctcttctgtcccttttttaaaaaattaattttttaaaataaattttttaatttccataggttattggggaacaggtggtgtttggttacattagttaagttgtttagtggtgatttgtgagattttggtgcgcccatctccagagcagtatacactgcccccaatttgtagtcttttatcccaccccattcccaccctttccccgtgagtccccaaagtccactgtgtcattcttatgcctttgcatcctcatagcttagctcccacttatgagttagaacatacaatgtttggttttccattcctgagttacttcactagagtaatagtctccagtctcatccaggtcactgtgaatgcaattaattcattcctttttatggctgagtagtattccattgtgtgtgtgtgtgtgtttgtatatatatatatatgttcttatatatatattcttatatatatacatatacaaattcatagatatatatatggatatatacatatatgtatatgtacaatatatatgaatatatactatatattgtatatatattcaatacaatagatatacaatacaatagatatacaatacaatagatatacaatacaatatacaacatacaatgaatatatatacaataaaaatatatatgtgtatatacatacactatatatatacgtgtatatattccatcatatatatacatgtatatatatattccatcatatatatacatgtatatatatattccatcatatatatatacatgtatatatatattccatcatatatatatacatgtatatatatattccatcatatatatatacatgtatatatatattccatcatatatatatacatgtatatatatattccatcatatatatatacatgtatatatatattccatcatatatatatacatgtatatatatattccatcatatatatatacatgtatatatatattccatcatatatatatacatgtatatatatattccatcatatatatatacatgtatatatatattccatcatatatatatacatgtttgtatatatatattccatcatatatatatacatgtttgtatatatatattccatcatatatatatacatgtatatatattccatcatatatatatacatgtatatatattccatcatatatatatacaggtatatatattccatcatatatatatacatgtttgtatatatatatattccatcatatatatatacatgtttgtatatatatatattccatcatatatatatatacatgtttgtatatatatattccatcatatatatatacatgtttgtatatatatattccatcatatatatatacatgtttgtatatatatattccatcatatatatatacatgtttgtatatatatattccatcatatatatatacacgtgtatatatatattccatcatatatatatacatgtgtgtatatatatattccatcatatatatatacatgtgtatatatatattccatcatatatatatacatgtgtatatacatatatataccatcatgtatacacacacacacacacacacacacacacacacccctcagtttctttatccactcattgattgatggtcatttggtctggttccatgtttttgcaattgtgagttgaacactctaaaatcccaaaggttgagccaatagtcactaaacaggagctcatagtcttcagctgatcctgatcccagcccccaggcctcatccaaactctccaatccatgaggaaagacattcttccaatcctgacctgccacaggcaaaggagctttcccaagactcagagcccaggtacaggttcagcctgtttgtgccacactgacattctgttctgaggcctcagccccctgtggtcctgcttctgggctgcaaagctccaaccaccacccattcccatacgtcatcacacccctgcttctaacctgcctcaccctccacatcaaaaacacgtgtgtctctcctctctcccaaagaactcaggcctggggaaaacaaaagccaggaagggaggttgcctttaggaaaaacccaatgtgtctacagaaagaatttaaagatattgattcaaggtttcagtgagacaggaggagtaggttttagtgccgcatgatgaccacagttaatgttaaaatattattatttcaaaattgccaaaagagttttaacattcttgcaacaaaaaaagataaattggcaagatgatggatatattacttgacttgattggattgttctataatgtacacgtagatcaaaacatcacattgtaccccataagtatacacatttatatttaactgtgaattacatttgttttattttatttatccattttttattgtagagatgaggtctcgccatgttgcccaggctggtctcaaactctcagcctcaagtgatcctcccaccttggcctcccaaagggcggggattacagacatgagccaccatgcccagccaaaaattaattattttttatcaaataagaaatttaaacatctctttcctttaaatcaggatctgtggtgtttactcagctgacctgtgttctcttccataactgccctcttaatattcaatgctgcagtcccactccctaacatcttgctatggcttcaatgtgtcccccaacattcatgggttgaaaaccaaatctccattccaatagtgttgagaggcgggaactttaagagcagcttgggtcttgagggctctgccttcaaacccaatgctctctctctcctctgggtgtcctcagatactgttccctggcctggaatattcctcttccactgaattctctttgcctgatcacctgccatccccacctcaagtctcagcaaaaagccaccttcgcctggaagccttctctgtcccctcatgcctgggtgagtgccatttagagtcctcttcacctggtgttacatagcctgtttctgtatttacggccttcttcagactggaagctccatgaggcagggccatgtctgcagtgcagtgggcactcagtgaatgaaaaaatcaacagtgctcccctgcttttgccgtcctgtcccgaagccagcgtgctggtccctgggcaatgtagggagtgtgggagctctgctttgtacagctcatcactccagtcacttgatgtgggagattgtcatcagctgttgacatacctgacttgcccagctgatctgtgggccacttgagggataggatcatgtctcatttgtctttactttcttagtgctcagcttagtgcctggcacacaccacacacacatgagatttttttttttttttttttttttagttcttaaatccagcccatttctttggggcctgctgtggaagatgaaaatggaagttggcagctggaatggatctgtagacaggaaacctgggagatgacaactgccgtcctgggatgggagcagggtccagggaaggatcaggggctcatatcttccagatttcagctcttagcactcccgcagggctccatctctgacctactgaccggctcctaggaagggctctgccagttattccttttgctttcttcttgcacttcccacagccaaaccatgaaataacaggacctggactctgccagacatgcagacatctcctacccaactggagagctgaaacctgaatattgctcttggccccacttggaatgtctgctccgcagccggcctctcccaatacatacacatacgcacacacatgcatatacacacatgcatacatacatgcacacacatgcatacatataacacacacacacacacacatgcatgcacgcacacacacaggtgcatgcacacacacaggtgcatgcgcaggttcacctgtacacatcacccatatttacttgctcttcaccttttagtctaacacaaattactccaagagccttccctgaactacaacttcatcagcccttctactgatgtatgaacgctcagtgtgctggctggtttcttatttagtgctacatcccccactaggtacaaattcctgagttgcagaggttggctgtcatggtccctaccctgcccctgacgcttggcatagcatctggcacccagcaatgtaatgaataccactgagtgtggaatccctccacaaccatcacaagtaggaagccccagcggttttgagttaactcccagttcaccaaagccagtggccaccatccctactgtctgaagtttcaagccaagctcctcaagtgaggctgagtcaaaagatgttttctgctttgtgacctctcaggctgaaaatacttgagaggtcaagtattgagaaaaaaaggggaggggtggggttaagcagtttgagctctttacaaacaagatgcaagcaaacaaagcccaggccccaggtgaaagataaacataacatgttctataaatcacaattacaaaatattcatctgtcctccttaaaacacaatcccgcataagccattctgaaatatgtaaaatgttgcagcactgttggggaaatgcatgatctcagatttaagaagaaccattgaacccagtacaccccacttgcctttatcttttggtatttccagaaccagaggctccagtaaccctcattttccctcatgccaacaccctgcaaatctgtgtcaccccagatagactgtgggcccagcatttgcctcagctgcactagagagaggtttgccatcagtagcagttaggagattaaatgggtacagtagtctcagacatgggaaccacagagttaaaagttcagaaaagactatgataataaatgtgatagaaagttcaggcaatcccattactgtgcatatgcccaaaggaaaataaatcattctacgaaaaagacacctgcactcatatgttcatcacagcactattcacaaaagcaaagacatggtatcaacccactgcccatcaacagtggactggataaagaaaaggtggtccatatacatcatggaatacaatgcagcaataaaaaagagtgaaatcatgttttctgcagcaacacggatgcagctggaggccattatcctaagtgaattaaagcaggaacagaaaacagagtgtcacatgttctcaattataagtgggagctgaaccttgggtacacatggacataaacatgggagcagtagacactgggaactccaaaagaggggacggaagggaggagggcaaaggctgaaaaactttctattgggtcccatgctcactacctgggtgatgggatcaatcatatcccaaatctcagcatcacgcaatgtactcttgtaataaacctgcacatggacccttaaatgtaaaataaaattaaaagaaaaataaagaaagttcaggccttatatagatcttaactgaaacctaataataacatttgatttgaatatgaagagggagaaagcaaaagagataattattttgccttaaaacatgtgccggcaaacttttgtaaggggacaattagtgaatatttcagactgtgaccacatggcctttgccaaaactcacctctgccactatagcatgaaagcggtcaccaacagtgtgtaaacaaacgactatggctgagttccaatacaagcttacttacaaaaataggcagcgggccagatttggcccacaacccatagtttgctaacctctgtcttatagtagagtggaatagaatggaatggaatagaatagaatagaatagaatagaatagaagaatagaatagaatagttgtgtactcttcccaaatcaataaaagtttaacaacagtctaagaattgcatgtctatatacacatttactgacaaaatgattctgagtttcatttgaagagtaaaataagagtaaataaaaattttaaggaaataggagagacttgcagtaatagatattgaaatgcattataaagctatagcacttaaaacaacgtggaatggacagatcaatggataagaattgatatcccagaaacattccctagtgtatacaaacatttcatttatgataaaatcagcatctcatcaaaagaaaaagatagatttttcaattgataattactagataattaggaaaaagccattcaagtcttttttttaatctatccatcctattctatagcaagccaattttagattaagtagttaaatttcaaaagttacttgaaaatacaacagtgatcaggatgggaaagaactttcaaagcataaaattagggtaacatacaagaagtgaataaaactaacctcttcatctaaaaacacatcactatcataaacaataacaacaaaaaacaaatgaacagtgatttttaaaaacactatagataaggaattaattttctttctacttttaaaactacttagaaatcaatttaagaaaaaaatctatctacctgaaaacaaaatcaatgagtgatcctttctgagttgtggtaatactagcaatctttgtttttatgcttttctgtatttgtctatattttgcaatacaggtgtattacttttataagcataataaagaccaacaatattttaaagcaaacatttaccacaataggagtgggctggaggaagaggttgtgaaaaacatgagattctaaagaatattagtgcaaatggtaataaagacataaaaatgggcatagtcagaactaattaaagaaatgacaatgaaacaccaattttaatgtataaaagtggcagaatttttacaaaaacatataagattctctgtggggaatgtataaagaaattgtattatcatacatgcttgtcatcaagtaattggataaaacacttctggaaggcaatttggcaatatatataaagaaccttaaatatgtacataccctttagtctagtcccacttctaaaacttagtccttaaaagtgaattaggcaggtgcagataatttatgtacaagagggggataacacagaaggataggtgggatgagtgtcctcctgcatcggtccattcttgctttgctataaagtagtacctgaggctgggtagtatataaagaagaagtttattctggctcacaattctgcaggctgtatggaggcatggcaaacagcatctgccactgatgagaactcaggaagtctaaaatcatggtggaaggcaaaggaggagaaggcatgtcacatccaagagtgagagcaagaaggggaagtccaagactcttttaaatgatcagctcttgcataaactaccagagtgagaactcactcattaccatggggatggcactgaggcattcatgagggttccatcaatgtaacacaatcacctccaccaggccccacctccagcattggggattacatttaaaaatgagatttggaggagacacacatccaaaccatattatgatgcccttggccccccagttgacatgcctttctcgcattgcaaaatacaattgtcttttcctaacagtgccccaaagtcttaacttgttctagcattaagtccaaagtcctaagtctcatctgagactcaagtcaagttccatccacctgtgagcctgtgaaatcaaagacaagttatttacttccaaggtacgaaggtggcacgggcattggataaattcccattccaaaaggagaaataggtcaaaagaaagaggcaatagactccatgcaaatctaaaatccaccagggtagacattaaattttaaagctccaacataatctcctttgactccatgtcctgcatcttggtgctagaggtgggcacccaggccttgggcagctccacccttgtggctttgcagagtgcagcccacatggatgctctcgcaggttagagttgagagcctgcagattttccatgctgaaattgcaaactgctggtggttctaccattctcaggtctggagacttccttcccacagctccactcagcagtgccctggtaaggactctaaccctacatttcccctcaacactactgtagcagatgctttctgtgtggcctaagactctgaagcaggcctctgtgtgctttccaatatatcctctgaaatctgggtggaagctgccaagcctccttcactcttgcattctgtgtgcctgcaggcttaaaatcatatggaagcaggcaaggcttgctccctccaaaggtgtggcctaagctgttatctgcagccctttgagccaaagctggagctggagcagccagggagcagtatcctgaggctgcacaggagcagcagggccccaggcctggccctgaaagcattctttcctcctagacctctgggcctgtgaggggagggcctgtctttaagatttctgaaatgcttttaagacctttccccatgttcttgaatattagaacctatcatttttttggccatgcaaatggctaagttgttctcttagcctacttggatttctctcctgaaaatgctctttccttctctactacatggctagggagcaaatttcaaaatttttatgctctgcttccctttcaaatataagttccaactttaagtcatccctttgctcctatatctgttcataggttgttagaagcagccatgccacatcttgaatgctttggtgcttagaaatttcttccaccagataccctagatcatcactcttaagtgcaaacttccacaatgacctaggatgtgatcatgatgcaaccaaactctttgctaaggtgtaacaagaatgatctttgctccaattcccagtaagttcctcatttccatcagagacctttccatcctggccttcattgtccatatttctagtggcattttggtcgcaaccacttaacaagtctctaagaagtttcaaactttccctcatcttcctgtcttcttctgaggccttcaaactctttcaaccttgtatgagtctgttttcacactgctgataaagacataactgagactgggcaatttaaaaaaaagaaagaggtttaatgggcttacagttccacatgactagggaggactcataatcatggaggaaggcaagaaggaacaaatcacaacttacatggatgacagcagacgaagagagagcttgtgcagggaaactctgctttttaaaactatcaaatctggtgagacttattcactaccacaagaacagcatgggaaatacctgctcccatgattcagttacctcccacttggtccttcccacaacatgtgagaattcaagatgagattttcgtgaggacacagccaaaccatatcattctgcccctggcctctcccaaatctcacgtcctcacatttcaaaaccagtcatgccttctcaacagtcccccaaagtcttaatttgcttcagcattaactcaaatgtccaaagtccaaagtctcatccaaaacaggcaagtcccttttgcctatgagcctgcaaaatccaaagcaagttagctacttcctggatacaatgggggtacaggcattgggtaaatacagccattccaaatgggagaaattggccaaaaccaaggggctacatgccccatgcaagtcagaaatccagtggggcagtcaaatcttaaagctccaaaatgatctcctctgactccatgtctcacaccaaggtcatgctgatgcaagaggtgagtactcatgctcttgaacagctcctcccctgtggctttgcagggtacagcctccctcctggctgttttcatgggctgccattgagtgtctgtggcttttctaggtgcctggtgcaagctgtcaatggatctaccattctggggtctggaggatggtagccctcttctcacagctccactaggtggagcccgagtagggactctgtgtaggggctctgatcccgtatttcccttctgcactgccctagcagaggttcttcatgagggccctgcccctgcagcaaacttctgcctggacatccaggcatttctacacatcctctgaaatctaggtggaggttcccaaacctcaattcttgacttttgtgcacctggagtctctataccacttgggaactcccaaggcttggggctttcaccctctgaagccatggcctgagctgtagcttgacctgtttctgtcatagctaaacagcttggatacaaggcgaaaagtccctagactgcacacagcagggggatcttaggcctggcccacaataccatttttccctcctaaacctgtgatgggaggcaccactgcaaaggtctctgacatgccttggaaacatttttcccattgacttggtgattaacattgggctccttgctacttatgcaaatttctgcagctggcttgaatttcttctcagaaaatgggatttgcattatcaggcctattgcattgtcaggctgcaaattttccaaacgttcatgctctgcttactttatgaaactggattcctttaacagcactccagtcacctcttgaatgctatgttgcttagaaatttcttctgccagataccctaaatcatctctctcaagttcaaagttccacagatctctagggcaggggaaaaatgctgccagtctctttgctaaaatataaaaagagtcatctttgctccagttcccagcaagttcctcatctccatctgagatcacctcagcctggatttcattgtccatgtcattatcaccattttggtcttcttctgaaccctccaaactgttccaacctttgcctgttacgtagttccaaagtcacgtccatattttcaggtatcttttcagcagtgccccactcccagcaccaatttactgtattagtcaattttcatgctgctgataaagacatacttgagactaggcaatttacaaaagaaagaggtttaatagacttaccgttccaagtggctggtgaagcctcacaatcatggtggaaggcaaggagaaacaaatcacgtcttacatggatggcagcaggcagagagagcttgtgcagggaaactgccccttatagaaccatcagatctcctgagacttattcactatcacaagaatagcacaggaaagacctgcccccataattcaattacctgtcactgggtccctcccacaacacatgttgtgtttgggtggggacacagccaaaccatatcaaacctcttcccattaccacattttcaggtatctttacagcaacaccccactccttggtaacaattttctatattagtctgtttgcatggctataaaggaatacccaaggctgggtaatttgtaaagaaaagaggtttattttggatcacaattctgcaggctgtacaagcatggcactagcatctgctcctggtgaggcttcaggaagcatccaattgtggtggaaggtgaaaggggagcaggaacatcacatggcagcagtttgagcaagagagagaggcagggaggttccagattattttaaacaaccagatctcatgtgaactaccagagcaagaactcattcacgaccatgggagggcaccaagctgttcatgaggtaatccaccccactgacccaaacacttcctaccaggcccctcctgcaacattggtggtcacaacatttcttttctttcttatttctttttttttagtttttttttctttttcttttttttctttctttttttttttttttttgagatagggtctcattttatcacttgggctggcatacacatacagtggagcaatcatggttcactgcagccttgaccttctcctgggcttagttgatcctcccacctcagcctcccaagtagctgggactaatggcatgcaccaccacatgcagctaaattttttatttctatttttgtattttcagtagagacggagtttccccatcttgcccaggctggtctcaaactcctgggctcaagcgatccacccacctcagcctcccaaagtgctatgattacaggccggagccactgcatctggctggaggtcacatttcaacatgagatttgtagggcacaaaacatccaaaccacatcacctctctgagcttaccatcagtgggaagctgaccccacttctggcactgcataatttcttttccatttgtgacaaattattggtttcagcctggaccctgacaccaagaatgtcctcaactctcagcctgcacttgataagcaccttacacaagtttctggaaaagttgctgctcaagatgggccagccacatctctgatgcctgattactcttatccctgaaaggttctcatctttctccttccctaaatgggctgagtctggtgtcaagggggtggtgttttgtgtcaaaagacctggaggtcttagcctatgttctgcacagcgtgatcttgggcagaccacttcttctctaactcgacaagcatgtactgaccacctgccatgtgctgggctctgtgccagggtatatactggtgaacaaggcacctgggatgaaacttgcacacttgttttttttttatctttaaaaaataatgagaatgtgcttatcctccacccttaatgtgcttaacccttccaccttcagctattgcaaggcaaaacaaagacagtatatgtgaatctgctgtacagtcaatgaagttctacaaccctgcaaaacattttctttagggtactccaagttatgctatgagcactgtagataacaaggccatgaaatctctttctccgctgtgccttgacaaagatcagcaaagtatcctggaaggtcctaatcatcctagagcaagactggatgaggtgggattcttattctgggtcacatagtggtggatattgatgaagatttttctgatacagctcagttgcaaaggcaaaaatccaagagtcattctagaaagttctctcttgaccaacccttccccatcaccatattcaaactgccaccaagctctgttatttcccactttcctccagatcatttcagaatgctgtgtaaaattgtttgaaatctttcttttgctcttaggataaagacccactgtctacaggcagaaatgagccaatccctcctatttaacatcatatctaatacttctgtcttccagcctccctgacctcaaatgcaccaaggcctcctgccccagggcctctgcacagtatgcttttgttgcctccttcctcatcccctttccttacatattccttttgtctccttccaattttatatgtggcctctgaaacatcagttcctcagcaaacttatccccaagccccaaatttggataagattcttctcttgacaccccatacagttcataaaactttttttgtttgtttgtttttgagacaagggtctcactctgtcccctaggagtgcagggttgtgatcacggctcactgcagcctcaaattcctgggctcagatgacccgcctacctcagcctccagagtagctaggactacaggcgtgtactaccaagctcatctaggttttctttttttttggtagaggctgggtcttactatgttgcccagactgcacacaacttttctatcctaagctaagcttgtcccagtttgtaagataacttgattatatgtccctattgtgagatatttgatttcagactctttgtctgtttcttcgttttttatttttatttttttgagacagacttttgctcttgttgcccaggctggagtgcagtggcacaatctcagctcactgcaacctccgcctcccgggttcaagtaattctcctgcctcagactccagagtagctgggattaaaggcatgcaccaccacgcccagttaatttttttgtatttttagtagagacagggtttcaccatgttggccaggctggtctcaaactcctgacctcaggtgatccacccaccttagcctcccaaagtgctgggattactggcgcgaaccactgcacctggcatgtttcttctttcaaaggtaagctccctgagggtagattcctattgaatagacgaatgaacaagtggagaggaaagagcttgaccatctgcactggaggtgaaagctaaaccctggaacatcaaaccgatggccacactgaaatgacagccaggaaaccgggccttcccacgggccagcatgggacgcctcatgtccatgatctgaccacctcctgcacatggacatagagcagggaacaccatgagcagcaggggagattttaaggaggaagtagaaaataaaagaggacctcaatccccatgcctgtgagacatgagggctctgttgccctgtggattctgttttatgcttccttttctgccttttcttcttgtcctgtgcttttccttctctagtaaagcgctctgtattctaaacgtggtaataaaccaagtggccttgtctgctctcatctttaaccagaaatataatctcctcgttaacctttggggggaggtctggctctgcccctcaagggtcagaggccagaatatttgggcatgcccgtggccttagcttccttggtcagcctgagttaatgggagatcagcatgtggggcagagctctcatttgctgggggtggagggggcacagtcattaatggtttctatggcaaaacactctgggtcttttgcatttgagagcattgctacttatttatttatgtatttatttatggtttagagacagagactcactctgttgcccaggctggggtgcagtggtacaatcgtagctcactgaagacttaaactcctgggctcaagtgattctcccacttcagtctcctgagtagctgggttacaagcgcacaccaccatgcctggatcattctttttattttttcttttgtagagacaaggtctgggtatattgcccaggctcctgggtatattgccagaggtctcgaactcctgacctctagcaattccctcaccttggcctccagaaattctgggattataggcatgagccactgcacctggtgggagcattgttatttaaaagtttgtggatattcttcctgtgactagtgtggaatcccgaggccccaggaaattcagacttatgtttcatgatggggagggtctaactccttatattattccttctgatcgtactcacccaatggggagaaataaaatgaaaagaataccaggtgagccacttcatctgctatcattttggcaacaagaaatggaagctgaccgggctcaatggctcatgcctgtaatcccagctctttgggaggttgaggtgggaggatgcttgagcccaggagttggacaccagcttgggcaacatggctaaacctcatctctttaaaaaaagtataaaaattgggcaggtgtggtggtgtgcacctgtagtcccagctactctggaggctgaggtcggaggatcagttgagtctgggaggtcaaggctgccgtgaacaattattgtaccattgcactccagcctgggtgacagagccagaccctgtctcaaaataaatgaataaaaagtgggagctatttctgcagcatccacagcaaacagagatggacttactcccttaaatctgagctgagttggccaaattctcactgcgtaagttggtctaatgccagcaacatttcctggatatgagagttttcagagctcttagaaggggttgggccaagcatggcggctcatgcctataatcccagcactttgggaggccgaggtgggcggatcacctgaggtcaggagttcaagaacagcttggccaacatggtgaaaccccatctctactaaaaatacaaaaattagccgggcatggcagcaggtgcctgtaatcccagctactcaggaggctgaggcaggagaattgctagaacctgggaggcagaggctgcagtgagccaagatgtctccactgtactccagcttgggcaacaaagcgagactctgtctcactttttaaaaaaaaagaaaaagtgggtgggggaggttggagccatgggtgtctgactctccctgggatgatttacatatattatctcatttaatcttcacagcaagcctttgaggcaggcagcatgagtcagctgaggctcaaagagataaagccacccacccaagatagggcagctggtaagtgagatgccacctacaccctcagtcctacttactcggaagtccatgtacgctgatgtttgctgttaccacactctgtggttctgccactaccatccttgtgaaactcgtgaaagctgcagacatgccacagctcagccttcccaattataaaaggagaataaaaaatatctccaagaggatggagttttctagagctccttcttccatctagttgatgacccttagaaaatgcttagtaaaatgagaaagcatttttaataggaaaaggtcaaatgaagaaatcttctagatgacaccataaagctttaaaaaccctttcgacttctgttctaagcccttcttcccggtactcaggccaagagaatcccgtcttggcatggctgcctctgaaccatttttgcagagagtcaggcattcattcattctttccctgaatgtttcctgagcagttctgaccaaagcacaggggagtcagccactattcctgccctccagttgctccttggcttgcatcttaatcttctgggctgctataacaaaatagcacacatgggatggtttttaaacaacagaaacttgtagcttccacggttgaaggctagaagttcaagatcaaggtgctggcagacttggtgtcgggggaggtcccgcttcttggttcatagaaggtgacttctatgtgttctcagatagtggaagaaaacaacagtggtttcttccatcacttataaagacaggaatcccattcatagcactccaccctcctgacctaatcacctcccctgccctgcccacttcctaacaccatcacatgggggattaggtttcaacacatgaattttggagaggcacaatgattcaatccctaacatttaacacataagtcttgcaagtagcttgagggtgtaggaagcaagtgctttgggagctcagagcagtgtacctggcctggcttgactggacatgcagcttatcttagaagaccatgcgtgatggaagttctcaggtgttcactcttgaggttgcaccctaggctctctcagatgctcccctgcaagccactgttccccaattctctgcaagggttcacctctggccttcaggacaaagtggagacttgggcacccttgggcaatgggaccccttcaggtggacagataaggtttatacccagtctgtggggccaggtcgggatcatggcatgactgtgggcatctcggtgtgccagggtgtctctccagcactaggggacccaggattgccactgttaggtatctggtagttcagctcaacacacatgatattttagcttcttgaatttttcttattggaccttagaggcagaggacctggttaattatgctccttggttcaagacactttattatggtgggtcaagtctaggccctctgttttgttttgtttttttcttatacaacttttattttagaatcacagggtccacgtgcaggtctgttacacgattgcacaatgcacgatgctgaggtttgggatatgcttgatcctgttactcaggtagtgagcatggtgcccaataggcaggttttcagccctggcccctcttcctccctcccctgccttatagtgtctattgttcccatttttatttccccatgtatacccaacattgaactcccacttataagtgagaacatgctgtatttggttttctgtttctgcattagtttgcttagaataatggcttccagctgcatccatgttgctgcaaaggacatgatttcattctttttttttgtggctgtgtagtgttccatggtgtatatatagcacatttctttatctgatccacagttgataggcgcctgggttgattccatgtttttgctattgtgaacagccctgtaatgaagatacgggtgcatttttggtagaatgatttgttttcctttgggtctatacctaatagtgtgattgctgggttgaatggtagttcaattcttagttctttgagaaatctgtaaactgcttttcacagtggctgcactaatttccattatgtctgatctctgttgtttttatttttaactctccccccactttaaattttacacaataaagttggaagacatttacattgatcacctgtatacctaccacctaggtcctaccttagcacattattatagtttaaaaagatcatttttagtagagacggggtttcatcatgttggccaggctggtcttgaactcctgatctcaggtgattcccccacctcggcctcccaaagtgctgggattacaggcatggcaggtgcctgtaatcccagctactcgggaggctaaggcagcagaattgcttgaacccaggaggcagaggttgcagtgagccaagatcgcaccactggactccagcctgggcaacaagagtgaaactccatctcaaaaaaaaaaaaatatgtctatctatccattgatctgaacttctatatgctgatgaatctatttttcaaatgcatatcaaggtaaattgcagatatcagtagacttacctgccaagacttgagtatttacttcaatattttagtgctttttctcctttgttgtaaagtttacataaaaatgaatatacaaatattaagtgcactaattatgagtgttgacaatatgtacaccattacaaccctaacctctatcaagatgtagaacattatcttcttctagaaagttccctgaagcccctttctgacccatcctccacccaactccacagaggcatgcactactccaggtttttccctttatagattagttttgcctgccctgaatctttacctatatagaatcatagatcttacaatcttttgggtagggcttcttttactcagcagaaagttttcaagcatcatttgtgtgctgtaggtatcaatagtttgttcttttttgttgctgagaagtattccattatacaaatatgctagaatttgtttatccattttttaggccatttccaccatttgaataaaactgatgtgagcatttaggtacaagtcttgatgtaatcttatgttttcatttcttcctaattaatacttaggaggggaattgtcatgtcactggctaggtatgcttttagttttataagaaaatgccaagacttttgccaaaatgaatgtactattttatcttcccaccaacaatataggaaggttctcaccggccccacatctttgcccatattaggtgttgttgaactgaatgtgaagcattctgccaggtgataaggggtgtcccattgcagttttaacacgcatttcactattagctaatgatgttgagtgccgtttctcgtacttgttggccatccctttatcttgttttgtgaagtgtttgtttaaatattttgctttcatttctttaatttggttatttgtccttttattattgaaatgtgggatcctttatatgtcctccatagtagcactttgtgagacatgttttacttctatttttcccagtctgtgtcttgtcttttattttcatagtggcttcttttgatgagcagcattttataattttgaagaagtgtaaattatcatgcttttctttctttcttcttcttttttttttttttctgagacgagtttcgctcttgtcacccaggctggagtacaatggcgcgatttctgctcactgcaacctccgcctcctgggttcaagcaattttcgggtctcagcctcccaagtagttggggttacaggcatgcgccactatatgcctcgctaatttttgtatttttggtacagatggggtttcgccatattggccatgctggtctcaaactcctgacctcaggtgatctgcctgcctcagcctcccaagtgctgggattacatgcgtgagccactgcccctggcctatcatgccttttttttttttttatggccactgtgtgctgtgcccctatccaaaatcttgtgcctactattggttcacaaggagattctgttttcttcttaaagctttatgatttagcttgaatatttaagtctatcgtccatcttatattgtggaaaaactttttttccctattatactagtcctcacttatccatgaaagagatgttcccagatccgcagcagatgcctgaaaccacagagagttccaaaccctacgtaccctgtgttttgtcttatacacacatatctatgataaagtttaatttataaattaggcataataagagatgaacaataataactaaaaatgaaatagggcaggctaagcatggtggctcatgcctgtaatcccagcactttgggaagctgaggtgggtggagggtgaatcatctgaggtcaggagtttgagactagcctggccaacatggtgaaatgccatgtctactaaaaatacaaaaattagctgggcgtggtggcatatatctgtaatcccagctacttggaaggctgaggcaggaggatcacttgaatccaggaggcagaggttgcagtaagccgagattacacaattgcacttcagcctgggcgacaagagcaaaactccatctcaacgttattcaagtgccatttgttgggaaaaaaaaaagaatgaaataggacaattagacaatacgctgcaatcacagtcgtgtgcatgccgttttgctctctaaataacttactgtactgcactcagccttcttcttgtgatgacatgggatgataaaaggcctatgtgatgagattccatgaccgtcaatctgataactgagacagctactgagtgactagtggtgggcggcacctacagcatggatatgcaggacaaggggatgacgtccatcctccgtgggacagagccggcggtgccggatttcatcgcactatgctgaactcccagcaacttaatacttatggatggtttgtttctgaaactttttttttttgagacagagttttgctcttattgcccgcactcgagtgcatgcaatggcacaatctcagctcacagcaacctctgcctcccggtttcaagtgattctcctacctcagtcccccaagtagctgggattacaggtgcctgccaccatgcctggctaatttttttttattttttagtagagacgggctttcaccatgttggccaggctggtcttgaactcctgacctcaggtgatccacctgcctcggcctcccaaagtgtgggattacaggcataagccaccacgcctggcctgaaactttctatttagtatttttggaccaagattgaccacaggtaatggacaccgtggagaatgaaaccatggatgagagggtgcaactgtgctgttttaaaaattgaatgaatgcctgtgtgagtccatttcttggttcctcctcttctttttaaaaagtatggcttcttttgtcttttccttctccattcccatgtcctgtcctcaaacatgagatgccatttgtaatgtgttgaaactattcatttattttgtaaatgttcttggaaaagatgaatttttgttttgtgtataagtgtctttatacaactgatattgcactatacatcttatggtgttaactgttgacctattaaaataagatatatatgatatctacatgtctttatctatatctagctatcgattgactgatctattgatcagttgatctatctcttttaatgagccattaacattgccatgagctaacactttctttctttctttttttttttttgaaacaggatcttgttctatcacccggactggagtgcagttgcatgatctcagttcgttgcaacccctgtctcctgggttcaagctattctcctgtctcagcctcccaagtgcctgggattacaagcacataccatgatgctcagctaatttttgtatatttggtagagatgggatttcaccatgttggtcaggctggtctggaactcctggcctcaagtgatcagcctgccttgtcatcccaaagttctgggattacaggtgtgagccacagcaccaacctgagctaacagtcttgtgtcagggtaatgctgttttgtgtatcatgtctcaactctctaatatctcagtggtggacatctgctcacctccaactttgtactaccaaaatcaatactgcagtaacatggccagaaatatcctgtggacctgaatgagaatcccttttgaggtagaaacccaggggcagagatcctgggtaatagaatatagaagacagcattttctaaaaatgatgaccatacctatcccatcctcacacactttctagaatgtgaggttgacactcttcattgagaggtgaagttcccattctcttttcttgatcctgggttgcagccagttgaaacggtgctacataatgctgaggctaggtcattgaaatatcatgcacctttttctggatctgtggggcccctcactcttgggacatagtccccatgctgagtggcagccaagcagccacaagatgaagtcacctggaagaatcccggccaacagcctcaactaggttgctagctgatggccagcaagcaagtgccaggcatgagagtgagtttctggtggttccagcccccagctatcaagtcaccccccagcctttgagctaccctggccacaaggagcagagataagctttccctattaagcactgcccagtttgaagactaatgagcagagtaataattgattttttaaagccactgagtatacggtggcttgctatgcagcaaaagagagctggaacgtatgaattcagggtatgaatctccaagaaatattagaggcggcccctttgcagggcttcagattctattctcccaacatcagtgccccaggcccctctgccctcatgtctctgctgtttacttagcattgcctcttactaattttgcctaatagttgccaagtaacagctcatccattaaaattgtgtttttctgattactaacgattttgaacacttcttcgcatgcttctaagctttttgggttttcccttctgagaaatgcttgttcatacgtttcccccatatttatattaggctgctgtctttctgtttgttttgcaggaggtccttctctagccttgatattagtcccttgtcagtttcagtcgttgtaaatatctttttgcattcagttacctgcctttgacagttgcttcctagccacagcagacaaacgacagaatgagagattccatggagaaagagcccccatctgtgccgtcattgtcctaagctctttaaagcagttctcaacaacattttctcacatttttgtacaatgccctgccgtctaacaatatatgcatatttatgaatttaattattaaaacaaccccaaaagatagctattgccactctccctgtattttgtagcttggtaaatgaaagcctagctagctgaagtgacctgcccaaggtcacacaatttttacatgttgtcagaaaatatttaccatcagctccattcttcccacggtccaacagagctgagggctgagggcagagaaaggacttccatcagatcaggtgataattcagtcccttaggagaggtgaagactgctgagtggacccaagcgattcagccttggagccaggggtctggagacaaggcctacctgtattaccagctccatgtttgggtgaaacatttctcccgtctaggcctaaatttcccaatccagaaaacaagctcaattgtcataatgacaatgacctcccaaatgaatcacgaaagttaaaagaagtaatataaactgtgaagtatttttacccaaaaagtctaaggaattagttcacctggacaaaaaccctgggttggagtagctatgtcagggtttcaggcttagctcaggtcctgaaaagctgtgtggccctgggaaaactccttcacctctctgggctgcagggtgcttattggtctaaggaggcccttacacacatctctacaggcccttccagcctagagattcaagctgaacctgagctagggtcagaggcggttcccagggaaagagcaggggggtgtgtgtgtgtgtgtgcgtgtgtgtgtaagtgtgcatgtctgacttgtgcatgtataagtacacctctgagttcacatgtgcatttgagcctgtgtaagcaggtgcatatatgtgcatatatgtgcatatgtgaggctatgcttgtgtttcggagcatgcatgtgtgtgtgtgtgtgtgtgtatgtatatatttgtatatatctatgcatgtaagcatatgtgtttgtatgtgaagagagtgctgtatcttgaaaaaaatgtttttgagaattaatagatgtgcatcttttccttgaatttcctggattataccccaaggccctttcttcccacacaatgagaaaggtgtggtttgctgttctggggactgggcggtggtgacagaaggcagatagtagggacgggtgtcatggaagcatccagatgggtgtgcactcttgcttccttgggttttcaagccctcctttctctgcagagtcccaggttgggctggtggaagaggcaggaaccaggaggacaggacaaacagggctgagaacagaagtgcctgagcatggggagccaacctggagagcctggccttcttggcctcttcctaccctctgatgagcaccagcgcctagcagcagcccacaacagacactcacaggtgtgttggggctgtgtgtgctgggggtggggtctctgctgctcggctcacggtgttggggaggactgactttgctgcatgggaaagggcagggataaggagcagggctgccccagtccagccggatccaggctctgatggacatggcagccctcactccttctcctccagccctgtggggtgcagctgttggcctcttcctgctgcaccacttccagagccacctgggcctggcagtttgtcaccactaaaagcctcatatcctggctccccctgcactattaatctcagaaaaacgcattgtcaaacctaatgaaaaaggggaagccaccaaggagaaggtgtccacacctcgggctgacagttgtcaggcaggcgggcagcagcgtcctgctggggacagagctggatgaacagaagcagtggaaagtgcctggggagatgggcacggggactcaggaccccgtgcacggggtgagcttgtgcttgccaacagcagaggagggaggaccaaggacaggaggcctggggcctggagggacactgtcagggacatggggcagcactcccaaagagaagtaccacctgaccaggactcccagaaaaggaagcccctggcagctgccagctgtgtccccagccctgtcctatcctctaagaccaagcaaagggggaaggactgagctccaatcagaggccatcaacggaaaggcctcaggcctcacctggcccattgaaaggtttcacttggtctgttgagtgttgaaattgttttcaatgatataaaatttttaattgggatagcctatgtaaagagcgagatttgcaatttctcttgaaaaatgaaaaaaaaaactgaccatttttggtttgggggtgtgatgagctgtagctgcagggtcgtgactggtgggcatgggcttgccggccgccctggccgcagcactcctggcggctggccacatcccttgccactcactgcggcagccgtggaagtcttcgttattcatagatgccaagaatcttcagtgtcctgcagctgcgtatgaatttctctttctgctctccctcagccatgtgttggtgctgtgggacaagccagggttttgctagcatgaaaatcaaaggcagtatattttagccttcccatcacagaccctctcctgtccccttctcattccgggactggttctctctcttattcagccaccattgcagttcacagccctccctccaaaggctcctatgaacccagagatcataagtcaatctccccctggacccaccacaccccttgtagattgcccaggctgaagactgataatttggagctctttcaacaggcagtgcattctgttggcaagtgggttctgagcatctcctgccattgtgtgcccagatgggggaacaaggggaaagacagcacctgtcacatcacaggcccaaggctgccagagagtgaccaaacccagagaggtaacatatgtgtgacagatgagtgtggagcaggctggagtcaatcaggagggcttcctgcaggaggaggagcttaagctggctagtgagtgagtggaacagggtgaagagcttgcttgctggagcaggctaggcctgagctccaggatttgatctttttgggtatagctatgtgctgttgggtgtggcatttaggatctctagacctcagcctcagtatctaaaatgggaatggttctagtgtctacaccctttccagcctcaagtactgcaaggctcagcctctgtctttctggagtggtttggtcatgtttgctggagtgagtccctcctgggcttccttagggctggtcccatctgctctgtgtaccgggactcaggataagccacatgggaggtgaccaagaatcactttttatttggccaaagatgggggaggcattgtagggattactgcaggagccaaggtcactgccaagtagatgagatggagaacaaacccacgaggtgttcgctgcaagttgaaaagtgaaatacttggcctaagcggtttcataacattcctcctatctctctatgccccccaagccctttcctacatttgggagggatggctgtggtgactggggaaaaagaactagagagttctaccagttgtctatcagacaagagcctatgatagactgagggaagctgggcagaaaataagctaagggtcacattgtttcccaagctcaatgagaattggcaaagctgcattataatttcagaagtatgtgtatggtataagataactgttggcctcattgttaacctggaatccttggcctctgggaaggatggtgtcttcttatgccctctccttcaactctcaggatgagaaactacaattctgagtggaaggaagggcatcccttagttcatggggccagtgggaggctttcttcctgtggggcctctttgagccttccagatggttggaagtggccctttatccttgtgggaataagggtgagaccgagggaaaagacaccgttagtgcctggctagattttaggatggcacccactgcagatcaccttctggaggtctgggacacccaccgcagatcaccttctgcagatctggggcgtccacagtagatcaccctctgcaggtccaggacacccaccgcagatcaccttctacagattgggggcacccacccgcagatcaccctctgcaggtctggggcgctcactgcagatcactctctgcatgtccagggcacccaccaaagatcaccttctacagatctggggcattcaccctagatcaccctctgcgggtccggggcattcaacgcagatcacccaccgcagatcaccctctggcagatcaccctctgcaggtcgagggcgttcacagcagaccaccctctgcaggtccggggcacccactgcagatcacgccctggaggtcttggcagtttgtgagcacaagcacatgcattttcgtatcctgaggagaattcactggtgtcatcccagcttctccgagtctgccctttccatggatgcagagaaattttccatttcagtgaccttctccacctatatttcatgactcgtgtgccaccctctcctcggagctttgagctgagaccacatttccacccccggcatcccaccgtgcctccactccaagctctctgcacctgccaggtgagacagggctgatcagaagatgctgtgatgagataaatcactttcccctcatcgccctgaggactctcgtagcctcctgttctgtgagatgtcttctagacagtgaattttccccgaggccctgggagcaggagcaccctgccccttggggatctcattggctcctcttcaggtgattcctatgaggtggcttccatgtttggtgctggtccacactggagggccaggccctatcttatcggtatttgtgaccctccgagtgccagttgagatctggcacagaagcactcaatgactgtttgcaaagaaaatgtgtgagttgcagagattcccttagacctatgctacaagcctgttcagagaatgagcatttgcaggagataataagtgggagaagatgagactgtgacccgcggagagctcatcagcactttggcaaacttgggtctccacatacggctcagctaggctgtgatttacctactcatgtgtctcagtcactctactagggctgggaggcagagagagaaaaggcaggagggaagggagggagggaggggaggaggaaagggggcaaggaggaagggggaaataaaagacttattttgcataatagagatggagagcattggtgggggggtggtgggtatgaaactcatacttttgtaaacacacaaagagagaaaaataataggtgtgcaggtaggtttgctattctgttcatcactgcccctctaatgtcgacagccagccctaaagtccaaatgccccacctggggtagcctgcaggaatccgtcctgtgctgcaatccctacaggagcccggggacagtacactggtgaaagccatccgatgtgtcttatttttagcagcagggaaatgtggacacctctgggtcaaccctgggattcaaatcatgtaacccaggtctcaaattctctcttgctcttctcttcacctatgtggactctagagttacaaatccctcctggacagtggaggtggagtgtggccagctgtcattttgacaggtcttccttgctgttgtcctcggctgttcaggtgacccccagatgcatgtggctgactgtgcgtggcctgtgtagaccagggcaccttggtagtttccttagtaacctgagcatgctgagaaggcatggttttcatgtgggccaggtaggggacagccacttcaactcaccaggtaaatggcagtgggacagggcactggcctgaccacactcaggaaaacctcacagagcacagaagaagagtgatgcatacaccatctccatacagcctgagggaccgcatcgccctgtgtctgcagcgacacggactgttggatcttcagtcaattcagaagacatcaacccatcagtctgtcatttaccatcattttttctttctttctttccttttctttttttttttttgagacagaatctcactctgttgcccaggctggagtgcagtgccacaatctctgctcactgcatcctctgcttcccaggttcaagggattcccctgtcttagcctcccaagtagctggaactactggaactacaggtgcccgccaccatgccctgctaatatttgcatttttagtacagacagggtttcaccatgttggccagacttctctcaaactcctgacctcaggtgatccgcccaccttcacctcccaaagtgctgagattacaggcatgagccactgtgccaggctcatctaccatcatttaaacaaaaactcatgtgcctccttctaactctaggtctgttcaggagcaaatgccactggatgtacgttggatcccactgtacatctagggccatgacttccacaccttggcatacctcggcatcacctgtagggctgcggccccagccctgagggctcctgaccgaggaggtctggggtgaggcctgagaacctgcatgtttaacaaggtcctaggtgacaccgatgctgctggtctgaggacagcactcaccatagtcagagaaccgtggtccaccggaaaagtgtgaatcctcggccaggctggatttatccaggattttacttctcctcctgcttttcttccttttctagagtccggccgggaggactgcgggcagctgggacagaagtgtttggaggtaacacgttgtatgtgttttccttgttctcctgccctgctcacctcgactcccttccacagctgtaggctcgctcctctgctgtgggctttcctctgttcctcagtcaccctctgaatgagggcaccctttcaggtgatgacacagacactccacagacatctgccggctgcccagtctccaaatgccctgcagagatgtgactggaagagtttggggcaattccaagggagtccgttgagagaatcatcccagttggttggaggagggcaaagaggtaagactgagaggagacgctctgtaagatgagcacgcaagagtatgccagggcagagcgggcacaggagagcaagcaggagtgggggacagggacgtgtgctatcttcccaggcagctagagcccaaagccatgcacaaagggaaaatcaccaagaggcaaaatgaccactgaacaatctcccaggatctgccaagtcaatatttttgtcattgttgttgttgtttgacacagggtcttgctctgtcactcaagctggagtgcagtggtgccatcatagctcaatgcaaccttcaccttccaggtcaagcgatccactcatctcagcctcctgagtagttgggactacagacacacaccactacgcttggctaatttttttcttttgttttgtaacacaaggtctcactttgttgctcaggctggtctcaaaccactgggctcaagtgatacccccacctcgaactcccaaagtgctgggattacaggtgtgagccagcgtacccagccccaagttaagactgaggaagctttcagtgacgcctccactcaggcccactccgagacatagattctgtccaccccagtggaccgggggcagaatctgtgctacttcattgtcattgtaagcttttgtttgttatttttagacttactttctttcatgtgagttatgtggatggttgaatcctcatgatttcttcttgcacaggatatagcatccccgatttcacctttggagcggtgatcatatagtttattgcacaaatcagacattttttttttcttttaacaaagttaagatcacaaaattttataccttgctttttacatgttataggatataaacacttcccgtttgactgaagtatctacttaatcaaaaagactgatgcttgtgtaatattccattttatgagtgtatcataatttatttcatcatttccacattgttgaacattcagtctttattcttctacttgtcattgtcatttttatgtaaggaggacatctttgtgtgcacatctttgtggtcattatggattgtttccttaaaagaaattcctggaaaagcattattaggtgaataaaatgactgtcttttaatcccaaatagggtaatagtacctccttcctcaacttactaaagaagaaaaaatcaagaagtcgtgaaactgggtcctgtcaacatcttactccaggaacctctagcaagagcacagccatgccccccggaagaggtggaagaccctgcttcctctccatctacacagtcttctccctacagccatgccccccaggaagaggtggaagaccctgcttcctctccatctacacagtcttctccctacagccatgccccccaggaagaggtggaagaccctgcttcctctccatctacacagtcttctccctacagccatgccccccaggaagaggtggaagaccctgcttcctctccatctacacagtcttctccctacagccatgccccccaggaagaggtggaagaccctgcttcctctccatctacacagtcttctccctacagccatgccccccaggaagaggtggaagaccctgcttcctctccatctacacagtcttctccctacagccatgccccccaggaagaggtggaagaccctgcttcctctccatctacacagtcttctccctacagccatgccccccggaagaggtggaagaccctgcttcctctccatctacacagtcttctccctgggagctagatagaaaatgctgatgtaatcggcattcagacctccaaaacaaaattaaaagactggccaggaaaaaaaaagaaaaaaacttctgtgtcttcagacactaaggcagccttcaaaagccttctgagcacagatggctgagaggtcagagaacgggaaacccagggtccctccgtgctaatgctggtgcccggtcttggaagatctgggtctcctgccagcttccctcctcacctgtcccagagtcagaaggtgaacatctttaagcctaatggggtgaatgcttactatactaggagctcatttgtaacataagggccctactacaatcccactcctcatgcaaaattgccaatttatggcaatattccttgtttagaaaacaaggctatccaaacactataattacaacgtgcaccagaagccgagagttccctacattaatgcacaggctccagatacattcgtcaaatagagttttttttttttttttttctctttgccttcttctctgggtacttttaagttcagggacagagaacatgtcttcattagaaacattaacattcacaggctgtagtaaattttgacagtgaaaaggtctctgtaacctttagttgtgcagaaatttacttcccaagaaaattacatctggcactgtcttaattaatgctagctttcttttctgaaaattgtgggcttgtcagtaaaaaaggcagaaaaacctgaatttaaaaggctggacacaaaagacgccgagaaataaagctctgtgagatttcataatattgctctgtttttgttctacagtaagaagatgaaaagatctcatttgattttgccaaatgcagcaacatacatgtaatgtagaattgatttgcattttctctcttttgtctctgagttttatcatgtaaagtgtgcttgggaaggtattctattttaaaagcaataggtcaaataaaatccatacctacgaggaaaaaaaaataatgtatgacttcatttttttagcctttctctaactgctagtattaatcgcagctaacaggaagaaccgtggctgttttcgcaagtgaattttgattatctgacattctctctcccggtttaaaatgggttctaagtatgatgggagagcttggcttcacgtccggatatttctattttgcatggcttggacgtctattttgaaaataagatgctttggctttctttggggtttagagattaccctaggtttattttttttcttctctattcaactttgcattttgatgatctagcattacctttctccagtttgagaaaggagcctcaaatacatggtcctaagtcattctttctaacgtgtgttttgtgtcatgtgacatgaaacttttttttttttaatttactttaacttccaggatacatgtgcagaatgtgcacgtttattacttagatatacatgtgccatggtggtttgctgcacctatcaacccctcatctaggttttaagccctgcatgcattagctatttgtcctaatgctctccctctccttatcccccagcccccagacaggccctggtgtgtgttgttccctttcctgtgtcgacatattctcattgttcaactcctatttataagtgagaacatgcggtgcttggttttctgttcccgtgttagtttgctggggatgatggtttccagcttcatccatgtccctatgaaggacacaatcaccttcctttttatggctgcatagtattccatggtctatatgtaccacattttctttatccagtctatcattgatgggcatttgggttggttccaagtctttgttattgtaaatggtgctgcagtaaacatacgtgtgcatgtgtctttacagtagagtgatttatattcctttgagtatatacccagtaacatgcttttaaaaatgtcttagttttgctatgtgtacaggaggctggagaactagaaggtgcgtggtcttggagaagctctgtagccatcaaggccaccctggggccaggcagggtggctcatgcctgtaatcctagcactttgggaggccgaggcaggtgaattacctgaggtcaggagttcgagacaagcccggccaacatggcgaaaccccatctctactaaaaatacaaaaattagccaggcttggcggcaggtgcctgtaatcccagttactggggaagctgaggcaggagaatctcttgaacccgggaggtggagattgcaggcaagattgtgccattgcattccagcctgcgtgacacagcgagactttgtgtcaaaaaacagacaaacaaacaaataaacccaccctggattctgatgatgggagagagaaagggtgacttgtccaaagtcacattgcagagctggactcagctcccagactcctgggtcctgtcctcaccactccacaataccctctacaacagcacacaggaaggaggactctcacctgttcctcctgcattgtgaagcctaagaaaacagcgatgggatcattgattttgatttggggccagtacctccaaaaatgtggggcagtcctgccttggaaactcgaggggattttaatggtatccagccagcatggtgtccagctagggcctgcttgggcactttctgtcctcccaaagtcagggaaggaggctgtctttggctccagccagcatatcttgaatgtctctgtgacactggctggccaccccttttaatagaaagagaaggacttaggcttcatcaagccttcatactgagctgaaatttaattacatagtttgtttccattatgttctttttaatggttatttcatatttatggtaagtgctattacttttctattcatagtaataatataaaacttcttttaaaaattaaatccatttaagtaaaaaagaatgaatataaattaaataaaaatattaagtaaaagagagtaccaatggctccccgggtgtggtcaagaatgcgagggtgctagaggaaagcttaaggttcaagttgggcagaagttgctttagaggacagagaggagcaggtggaggggacccccacctgctcctctggactcccgggtgggatatgtcttcctcaatgttccaggagctttttacatgaaggtacccattatacataatttacgtgtgttgatcaaatgatgagtgggcgcctctcgctcatttaataactcaccgtggaggctgttggagagacgcccctcgtctccatgcttaacagactctcctgctgctccatgacagctggataggaggcaatattttaagataaaaggattattaaaatagtgcatgtgctgtgttcacactcccatgtgcttcctctttctctgagttgttgtcgagtgccatgtaatttaataaattataacatatttataaataacaccttaggttaatgttgtcatgcatttttcacaacttagcattgtacacagaacgagtgggaaagtcgggggagaaggggtccaaaatgcaaagagaaaggagggtgctcacagcgtcaggtgggagtgggcttcccccctaaagacaacagcttgttcagggtcgctcatgtgcagagggtggcctacgggtccatcaggggctgagggatatgcttggggcctgtggaagagctttggaggctgcggaaatatggggtctggggtgagtctatggggagtccatagggaccactgggggtccttggtggtcagtgtgggtccatatggggagtggtaggagggatcagagtccagatctagactctgcctgaacctcctgcaagcctttcaccccctctctccctctccaacccagggcctcagttttcccacaaggagcttaagcaagaggctcctgtccttattctaggattctagtttcccacaggagacagaaccattagcaggtggctgtattatgtttagatgtctcagacttgtccggggctgtaggagtgtgtgggggcagtgggagtgtgttcagggctacgggggtccatggctttgggaaggggctcagggcagacagtgtccaggcaggctgcctgcagctgaactgaccatctacctcttcatatcctacctgcctggcttttaactgctcaggaaattaaacactgtccatttgaaaaattagagataaaaccataagagagaaaatcaaaagatctgagatgagccaattcctcctcatgcgagacttggctccaagggtcctgggagtgaagacaaaagagaaacttgagactaccactccccacgctctagcacatgtgcagagcactcggcaatcttgtggaaatgtggattgtgattcgggagacctgcgcaggtgtatgagggtggaaccacactttgagaagtgactttggacaatctggtgctcagagcctgcaaaaggaagccagcaaagccacaggcagagatgagctttgcactggagattaagcagctcaaatccatgccctggaccaccaggcacccaggcccaaagggctgattttcacaaaagtttggggctcagacagtgcaaagccaaatggaaagatgccacccaggagggatcatagtccaggtctagactgcctgagcctcctgtaagcttttcaccctctctctccctctcccacccagggcctcggttttcccacgaggagcttaggcaagaggctcctgtcactattctaggattctagtttcccgtaagagatagaaccattagcaggtgactgtattatgtttagatgtctcagacttggtgtgaattgggactcctgtcccaaattaccttcctcgcctccagccaagttgcccgaaatgctatcattagtgcatcattcctttgaggacaaataggcttatcacaaaatgtcactgcacacagggaggtggcaagcccaggcttctccgagtagaccatcttctctcacagccgggtaggggatgagtgaggctgcctggggagagagggctggcttcagaggcacacagtgacttgtcccccaggctgtctccatgagcagggcacacaggaaggctcaggtgagctctgatgtgcaaagataaaggtgtccagctccttcgtggcccagagacaatgttgcttttctaggaaaacccaagtctgagagaagccaagccttgggaaggtggtctcagctgcagcatccgggagtcccatagactgtgggcatgcgttttccaagcagtgtcctcttgtccctaggcagaggttgttctttctcgatagctgttccaagagtgctatcctggggcttcctaaccactccagaccctctgtccagccaccaggtgcagagagggtactgggaataggagacacccaccttgtactcatgaggggccttgactgggtccctggactaggagagctcccttccttcctgggcatccccagagggctgttgggtcgatgttcaacatggagcagagagctccagagatgctcccaggaattaggtatctctggaagccagagcctggaaagccccctctagaacgcacggaccagatgtccctttttgtctatttaatttattttattttatttttgacttttaagttcaggggtacatgtgcaggtttgctacataggtgaacttgtgttgtgggggtttgttgtacggattattttgtcacccagatattaagcctagtacccattagttgtttttcctgatcccttccctcctcccacaccccacccttcaataagctccagtgtgtgttgttctcctctatgtgtccacgtgttctcatcatttagcttccacttataagtgagaacatgcagtgtttggttttctgttcctgtgttactttgctacgaataatggcctccagttccatccatgtccctgcaaaagacatgatctcattctttttatgactgcatagctttccatggtgtatatgtaccacattttctttatccagtctaccatggatgggtatttaggttgattccatgctgtggctattggaccaaaggtttctaagtgggaaatccggggcctcaaagggctgctggatgaactagaagggggattgtgagcccacaacagtgacatgaaatatgtgcacctatgcatttccatcctcgtgacattctcaaaaaggcttttgatgctaaaatatcaaacaataaataaaacaggacaaaacacccttcatttgcagacttgcctagggttcaaggggtaaggctctttggaatgtttttctccaaaccagcttcactcctaaggctcttttttgacatgtaatgtctcagaagagaaaaggcaaatcagtttcttcctgggaaactcaggcttcctgagtgagcaatcaaatccctacgcactgagctagccctcgcattctagctgctgggccctgtccaaaccctggtgaagagggcacctgggactccttcccatagggaaggtctggtccagctttctaggtggccagccaggccacagaatacctttctttgccgctgcggcatctatcccgtggttcaacagtttccttgtgttacaagtcctagggcggccctctcccccccacgcaccgtgccggcatggtctggatgcttgcacacaccgtgcacgtcatttctgccctgtgctgagctgtgcagagagccggaggggaacaatatattaccacgttctttgcctaacaattggtaacacatgacacttgtatttgccccaagataatgtacaaatatgttttacagggtttcctaatgataatcatgatatttcattcttcttgcccttctaataatgataacagtctagcattattattttttttaactgttctcagcgagtgtgacattcagttcagagaatcgaatgtcagcaagaaatctgtatgcactccctgaagctgggagaagccccttccgtttatttttaggttgcaggagaatgaagtgatctcaccttattcttttttttccccccttagaaaggtgtttggcattcagcacctctctgatgtttatgaagtctggtctgaggtgtaggcattctaggtcttttcgaaagctgtcctaatgagaaggtgggggcttgatcaacattgcgtgggggccatggagggagagagttcctcccttagaagaaaagtttctttcaaagtgggctttgtatattgaatgaggaatggcttgggcccctcagcaaaagacccaactaattagtaggtaaagcagccacttcaaggctccttgtagacactaggtagaaacacctaattttttttcccagctacttcactgttcttcagggtgcatttgacatgccaatgtgttttttcatccttgtcctccaccattagggagcgttatcttcagggttaaatacccaacaaatagcatatatatatacactattataataataatagtgtgtgtatacatatacatatatatatatatatatatatacatatacacacactattattaaccagtagcagttctaggcatgctgaaaactacatttgagctgttcaccagaaactatgcataagagatgaagattgatcaaaacctagaaaaagaaaatagagagccagcaatgataaaattaatatgatagaggcttaagttaggatagcatttgttgcctctctcctctaagttcttagttttaaactgatgcttcattgttccaattatctaagctattttgacttattgggtttttttccctctttttcttttctttcttttttttttttttttgtagtggccaaatgaccaaaagtgtcctatttttggccaagaagtggtgagattctagcacacactaagccctttatggctggctggctgacagagcaggaaatggtggcggccataggtaggacattacactgaagccaggcctgggatccgattatttagggaggcaagtatttttgttgatgagcgaaatgaaatcctctgacagcaaaatcaatcttctgcagagaccccagagcattgatcctggtgcacattgacaggctcaggctgtttagccatttggaatgaccacaaaaaatgagcaagttgttaagagttttagagttttggtatttattggcaaccggtgcactcatatgattaatcacacattcgaaatgtgtgtgccatggaaattgactgcaacgcagcagaaacaaagttttcagttatcctcgtataataaattgaagctatatccctaagcagaattgtcttcaagattccaatttgccttgttaaaagtgttgtttatagagtagttagcaaaaacgcaagtaattacgtgcagaattcattctaagcaattctttattttcccccgttctgtattggttttccatcttcattacccagtattttggtccatctcagcagaaacctgactggtgagatggcggccaggacggcggccttgatggctttggccatgcgcagagtgcatgtggtcacaggcatcagtgtgtgggactcgaacaggcggggctccaagactccagctccggggccgtgttgacagggacaaggcaggaacggcttcggtgctatatttcatttcataaaacaatatttacttctggagaagacgcctctttatttatttatttagttcgttttgagcaggagcacagtttggtatacacgtcgcggtggagcaagccacatctgttttggttgcgcaaccagcaggacttcatttcacaaatatcatccgagtcaagaatacagcttttggaatgcaaattatgtttaagtgagtaaacattgcagcgactgtgtacccccctaaacccccccagcataggaggggatagggcagcaggcagtgggtgcaggctgtttgcagagacccccagtcagggtccctgtggagggtgggcagcctggaagggctcccactggggaggggagagaatgagcgcagtgcctagaggggaagcccactccgcaaagccctgcttcccagaggctcctgcttgctctccccggaacagagacctcatccatatctatcaggagaggcctaattatagagctcggagattttaatggcacagggaaatttaaatgcggtggaaaatatgaatattcctaagccagcagtcaaaatacgaaatgattggcttccgaatcaatgaattataatttcacagtgtattctccaaggtggagtctctctcccttcccaggaagagttttgtgcaggcagacgtgttttaataaactgtacttcagtattttgttcagcagaaccttgcctccctccagccccggatgctgcagccttcgtcagtgctcggtccccccaaacagattgcaggggacaacaggaacaatcacagcatcctgggggccagcagggggccagtacctgacaggcacacttgagccgcagccctggcttcccgggtgcctgcaggaagcgtatcagggtgtcaaaagtaggggaccaggatatttgtctaaaacaatctggctcctgctcatgcacccaaatcccccatctcaaagccacaatgcctttgtaactgaagccttttccagctggagcagccagtgggtccccgacgcgggacacacccttctcagcctcaggcactgagtgactcccttcctccggctcctatatctttacctgtggaggagataaggatgtgccccagctgctgtccatgcaaccctcaaactggagagtcatgccataaatcctgttttattttatggacaaataaatgctgaggtaaaatattccaggatcgtcgcttgaatacttgccatagcagcggtactgtaataaccaccgtgacattaatttactgcattgtgccgtgggaagaaggaagaaggagggagaggggcattaaaagagaaaaatgactttccttcgaatttattgggattggcctccctcattttcagccatcattagttgattaggccctgatgacagtgtggacaatcgtgccggaatagttggcggagagacgccctaaaggtactctgttaattgagatgatgttcatcttgtacttactgaacataactgcagaccgtggaattggtggttagtgtggtggaaccaagcaggggggccgggctgtggccagaggccgcgggctggggtgggagcacctgctgctaccccctccccaccagaccacggcatccacccagagccctggtcactccatctctattctgagcactgccgatgaacctgtcaagagaggataaagcaagcttcccttttatcccaggagcgctcctgagctgctgctgcacagagaccaccaggaagatcccccccataatcgccggctttgaggactgactgcagtctgaagggtatcattccgagacccgcaagccagagctgagaccaggctcctcttcttcccagcctcgatgctgtagacagtcattcctaacgggaatacagacgcaacttccatccgcatcaatggctggggcttgtccacaaggagatcccagccggggcagagcgaaggcctctccaccctgggatggagacccagtttcgtgtccacaagctccattggcagcggccttggccgcgtatcccgagcaaggagggtagctccacttcgtgatctttgcttaaacattttcagaggccaacactcgctgtctgtccccagggctagagaattgcctgctaaaggtatttaggaaagaaaatggaatctgacatgtttgagtgatttagtaagggccacataccttccgaggtgcttgacatccattatcccacttaatctcctcctaccctatttatcgtcatttagggtcagggaatcgaagctcagagaaatgagcaggcccagtgccccatggcctgcaggagcctggaacagggaagtaagtaggcaggggaggtctctgcttcctgagagacagtggttgcagaagctctaggatcagactccctgagctggaatctggctgtgcttctctcttgctctgtgatcttggacattgcttcctgtctctcagcctctatttaatcgtttctaaaacaaaaataagtacacaagaccatgatgtgggctcggtatttgtgagtaattttgattgctgtagtcgttgtggttaagggaccatcagcagttatccttcttggaatcccggtacctaggagggggaaggagcacaggattgctccagcctcagtcatgtgaaaagggagtgcctcccacaccctccccacagcccaccacgcctgtcatgtctagacaaccagacagatgctcgggcctgaagggtgacaaatccactcacaagatacagcttgctaagtggcagtggccttttattctctgacatctttccagacccttgaagggattagaactggattagtttgagatgagcctggctctgccgttatcacctgtttataggataatgacattatctagtttggcccgtaagggcctccatacgtaggagcttcgttctctttgatctggagggtcgcagacaacatatctttaaatctaaacaaactcactgaagcccaagataagtgttcaaaatacccagtgagaagaaaggagcctctcttttcccttcctgcccaatgcaaagagcaattttaaaattgtgtgcactcacacgattttaaaacctaaaactcatcctgccactttggaccctagcttccttgcgtctcctttcacgtgtgcacagaattctgaagtttgtagagctttttcaacccatctcaacttatatggtgagcacagccgtctgagcagagcagggtgagctcaatacacatgatacaggctgggacacaaaacacaaggctcagggaagacaaggagtttggcaaccctcatgtcttttttaagagaggagctgtggttaaacccagctcatctggaaaaacccagcactcatttcactgcctgaagccatctatgaaccgacctctctgcccagacagctttctttaaagaggatcctcattacccttcacagaaaacatctgtttagacagatgttccaggaggtccttggcccaagtccactttcttgtcccaaggcttccctaacgtccatcatccctgtttaaaaattatttttattgaagtataatttacatgcaatataggcaatctgctttaagtgtactgaccttttgttaagttttggaaaatgtgtacctttgtggaaatgatgcaggacaggaaagacccaaaactagggcttagcctgggaagtttcttggttttgcccaggaaagaattcaagggggagccggtggtattagacagcagcttctattgaaaaggccatgcacagcagcagagggactgctccttgcaaagcagggccaccctacagactgtgtgcctggacatgcagctcagaggcacctctgcagacatatttatacccacttttaattacatgcaaattaagtggcagattatgcagaaatttctaggaaaagggtggcaacttccaggtcactgggtcattgccatggaaaggggcagggtgttgccatggagtgtggccatggcaatggcaaactgacatggcacaatggtaggcatgtctcaaggaaagctgcttccactccacccctgtttcagctatttctcaatttggtccagtgttcaagcccaacctttggagtcgagtcccacctcctacctcagaaccaccaccataatcaggatttagaatgcatcaccccaaaatgtttcttcatgtccctggccccttgctttcaatctcctacagctcctagtgagtattgatagttcagtcactatagtttttctttttctagaaattcgcctaagtggaattatataatatgtaccagcttctttcttatatctggcttcttttacttggcatgctgtttttgagagttaggcattttgttgtgtgtttgattagtttgatttttgtagtgtgtttgatttgctgtgtgtttttctttatattgcagagtagtattccaccgtatgtatataccataaaatgatttatcgatgctccagttttagacatgcaagtagtttccagcttaaggccattctgaataacgctgctatggacatttaggtacaagtttttgtgttaatatgttctcacttatcttggacaaatatctaggagtgagattttggcccatatgataaatagatatttacattataagaaactttctattttttaaagtggctgtattcctgccagtaatgtttaacattccaattgctccacatcctcaccaacacttggtattgtcagtctttctaattttaccattcttgtgtatgtacagtagtgtcttgttgtggtagtatttgcatttccttagaaactaatgatgttgagcatttgttcatgtccttaattgacattcataatattttctttggtgaaaggccagttcaaatcttttgcccatttagattgattatcttcttatatttgagttgtgccagttccttatatattctgggtgtatctcctttttcagatatttctagcaaatatattctcatagtttgtggcttttcattttcttagacatgtctttcaaagactaaaagttctaattttgataagtcatttattcattttttcttttatggtttgtgttttttgtgtcttatgtaagcaatttttacttaggccaagatcacagggttttcttttctattttcctctagaagtgttaatttttatgtataatgtgagctaagaaatgaggtttatattttccatgtgcatatattgttatttcagcatgttacacctctcaatgtatataagtcttttctattttatctcagtaataatttgtagttttcagaatatgcctctcacattgtttattttattcctattaatatttttcatactattataaaaggtattttaaaactttgctttataaaaatttgttgtacatttttatttttattccttttttaatttttaattttgtgggtacataataggtgtgtttatttatggagtacatgagatattttgatataggcatgcagtttgtaataatcacgtcacagaaaatggggtatccattccctcaagtatttatcctttgtgttacaaacaacccacttatactcttttagttatttttaaatgtagaatcaaattattatttactgtagtcacactgttgtgctatcaaatactaggtctttttcattgtttctgactaattttttacacattaatgatccccactctcccatgttgtatatttttatgtctagtccatatattctgtttcattgctaaattgacttattaattctatcttattttatagatttcttggatttcctccatagattatcgtattatctgtatgtcttttatttgtttttcttgacttactgtcctatatgggacctccactgtaaattttaatcaaagtggtgaaagcagacttccttgcctttttcccagtcgtaggggaagatttaatctttcatcattaaataggaacttagctgtaggtttgtcatagatactcttaatctagttgaagaagttctctatattcttagtttgctaacagtttttattcatgaattgctgctcaattttgtccaatgctttttcagtatctatgattgcaattagttcctgctatgctatttaaaatcttgcaagaaaaacctcagtgcttatggaaaaattggggtgacaggcaccacactaaaaacctttatcagtgacacacacaagaaaagaaaagatgagaacctaataaaaatggtaccactgttttccacatattactacatagctgatttcagctcagtgcagttttttgcattcatctagttttccttgatagcaaaattgtgcataagcaaacacaaagttcaaattgttcttaacacgtgaattgcattgaaacaaattcacatttcaaaacaagtgttacagcagaatttattgtaaaagtttgtgttttttagtttattaataaggtaaattgcaatgattaacttttgaatgttaaactagtctgccatttgttggataagcccatttagtcatgatatattattatatttgtatttttctggatttaatttgttaaaatttgttaggggtttttggatgaatatttataaggcgtgttaatgtgtagttctgttttatagtaatgtcttcttgttattttcatatcagattaaggctggctgtgtaaaatgattgaggatatatttcttctcctatagtttctggagcgtttgtatagaactggtattgtttattctataaataaacaatagaattcatcattcaagtaaactaggcctgagattttctttgtcaaaagttttcaaatgatgaattccatttctttaatagataaaagcctattccggttatttgctccttcttaagtatgcttcgataatttgtatctctcaagaaatttgacaatttcttacaagttattgaatttactgacacgaagttatttctcatatctccttattatcctttcaaggtctgtgggatatgaagtgatgtctgttctttaactcctaatattggtaattgctgtgttcctttttccccttcttttttattatttagtctttttaaattttcttcatttattgatactttgaagaaccaaattttgtttccatagatttactcaattatctgttttctattttattaatgtccagtctttataatgttctttctttctgctcactttgggtttcagttgctcttcgttttctagtttcttcaagtaaaaattcaatcattgagtttagttttttcttcttttctaatgtaagcttttaaatataacaaatttccttaattatcactttatctacaacccacacattttgattttttaaaattcagttcatactatttccaggccataatgttgttttatttttcctgtgatttcttttttcactcatggatttttagaagtatgtttttaaatttcaaatgtttgtggtttttccagatacctttctgttattgatttctaggttatttccagtatggtcagagaatatacttcttatttttcaattttttaaaaatttatttaaacttattttatgacctagaatatgagctaccttagtgaatgacccatatagacttgaaaaaatgtgcattctactcttttaggattttctctaaatgtccctaaatgtcactcagttttggttgattgacagtggtgttctggggaacgtttaactgaatatctggaaagaaaaagtcctgatacatagtatttgataccttctgtggatatgcattcttatcaatgctgattttaagctaacaatgtgctgtcaccacattgtgctgtcacaaatgaaattgctttcactagccagtgcaagctagttctagcacaccacagtgattgtggtattcaaatcttctgtatctttgttgcattttgtctgtatattctttcagttactgagagatgaatgttgtaatcttgaacaatgatcactgatttttccatttctcttttcagttctttcagtttttgttttaatgtaatttaaagctttatgaagtgtacatgcatttagcatttacgtgtgttataacttcttgataaattgatccctttatccttatgaaatgtacttcattatcactggtaactttcttttctttgaaatatatttctctgatactaatatagctacccccaccttacctttgattagtgtttatatggtgtagaatttttcattcttttacttaaaattttttgaataattttggatttacagaggaatgcaaagatagtactgagattctctgcataactgtcactcatctgtccctaatgttaacatcttaaacaactatggcagatttgtcaacattaagaaattaacattggtgcattattaggaactaaagcacattttttacctggatttccccaggtttgctactagtttcctttcatgttccaggagtctatccaagagtccacatttgtatttcgttattgtgtcaccttagtctcctctggtccatgaagatttctcagtctttttattgtttgtcattgcctttatgcatctaaaatgtactagccaggtattttgtagactgtttctcaattcgggtttgtctgacatattctcatgtttatactgggattatagaatgtgaagtgtcctcattacatcttttaggggcagaaatgataaaaatgacactattactgatgttaactttgatcatttggttaagtctgccaggtctcttcactgtaaagttactatttttttttccatactgtattcattgaaagtgagtcaccaagttcccagaattaaagaattaagttatacttcctagaggggagagagtatttatatgtaaagttatagagttataggtatgtgtgtgtatatacacatacacatacacatacacacacacacacctataattttatatttaaatatacatatataaatatatatactgtacatgtatatacacataatgtttattgtataaaattattcaaacatttgtcccttttcccaaccccttgcttatttgtaatttctttctctaacagtgagaaacttggcttcctttatttataaattactagtttttatatgtaaagtagttttataattgctaaatatatccctgtgagaaacacatttactacctaaggtactgtgtttatatatagttttttttgttgttgtttttatttaggtcagcccctttttttcttcatcccagtggtgatattttgtcatattttaataaagttagattcatttgtcaaggtctacattccatcctgggatctttcaatatcctggttgacttcttaaagaatatcacatactgtaaagttttctttgtagtgtacagttatgttgattttgagataaaaaagcagtaccatctatctaccacccaagaaccatacagaatagcttcatccattctaaacattttcttctctgtcttgttatagtcaacacctccccactccctaacccctggcaatccctgatacgttttctgtacccataattttgtcttttctataatattatataaatagaatcagaaaataagtaaactttgtgtctgacttctttcatttagcaaaatgcacttaagatttattcattttgtgtaaagcaatagcccatttctttttattgctgagtagggttattccattggatagctatactacagtttgtttattcacttatctgttgaagaacatgtcggcattctttttcttttgtcctctctgtgccgtgtatttaaagtgcatttcttttagacaagtcgtgtttttatatccaagctgactttttttaatcaaaatatttagaccatttacatttagtgtaatttttaatatgattaagtttatcatcttgctatttgttttttaattttcccatttgttctttttatctgtcttcttttggattagttattttttaactacattttatttccactaccattttgtattttagttttctaaagtttacaacatgtattttttaacttaccaatttactttcaaataatatcatgccacttaacatactttataagaatcttagaacagtatacttgcatatctttccttactttttgcaattgttcttatatgtttaattacttttattattaacttttaatgtgaagttccaaactaagaaaatggcctctaaccataaagaacaggatcaaatcctggctttcttactcactcactatgtaatcttaggcaaatcactttacatgtttgttcctcagtgtcatggtaaagttgtctgtaaaataacaagcttgatatgaagaaaaagtaaaataagccatgacatagttgccacaccatagctggcacacatgaagcaaagggatacagtatcccttctaggccaaacaccagaaaaagtttgtcgggagtggagagctaaaagtgaacagtttcccatctctgagcacactcattccttgctactcatagtctggccctctgtgacaccaggaaacaacagcagatgccaaaatgaaccacagcagcaaactaagggtgcccatctgtgtcaacaccagcagacataactgattctattccaagaaggaaattaaactaaaaatcagttgtactttatgtgagctccccaaatcacaaagactaggttactaaggaaacttgcttctgcaaacttcaagtgttgaacttaagtggtgagtggttttgtctgcagacaccatgtaggatgcctgctggagattgggggcttcagagctaccttattttcttacttcctggcccagctggctgcctcttctcctgagctgctagctttcttctggagggatggataggctaacgcacttgtgaagtaagctctgggttcagacacacctggatgtaaatcatggcccataattcattaatcataaccctgcagaagccacttagccccaccaaccctcagtttcctaatctataaaatgggaataaaaatgaaacttaatgagataatgcattttagctaagaagagtagtgggataatattctaaaatattagccaatcttccctgctcttcctctctttcatttatccctcagttcattttgttctatctcttaggccctgggcagaatagagcagcagaaagcaggcaaagaaaggagtcttttctgactgtagatttccagaagcctaggccctagggcaggggcaagtctcagaggacagattcaggagagagagatgatgatgaagggccaggagtgtgggctgtcagattggaaaccagtctgagttaaatctgggaggaatgaaggaagggaaacagaagggtgagggctttgtttccaggccaagtgcaaagaggcagcacagccccaatcagttttgtgggatccaccaaatggctgtagaaggaaagggagagaagaaagggcccaattgcctgggccagcctctgagttacactggctgggtagtatgtccatgcacacaggctccaggtcagagggaagcccaggatgaggcaggacccacagagtggcctctccacacccaggagttcagaatgccaagcttgatggagcttgtgggcaggaccaaaacctccttggaggtgacctgcatggacaaacctccaaggaccagaagaagggtgcacaatttagcagagatgtcatcagagaagggagggtgggatgcgaaaatttctctctgctcttctccctctacaactgcattttgctgaatttgtgcaggttaaataagcttatttcacaatgtgacttgacagtaataataacacaatcatgtcacacaaccaaggcctcagtttttggcagggatttaagctgtccagagctttgttgtgatcatgggtgcatttaacattcccgacaatctgccaggcaccagggcctggctatgagggaaggaactcctacaactcagagtccctctccttcactcagcatcctcaccagacctcgtggaaggaagaaatcctctttaaaagcagtgatattcatgcttcagcatttactgagcacctgctgtatattgggaccaggaagagaccctgccctcatgaggctgtcagtccagagcagtagatgtacattaatcagttaaaggcgaaagtaccctcacagtgactagtttctaatgagcaaacagaacttgtggaaggctggcttccccccatggcctcttataagtgtttaaaatcaatcaatcaatcagttaattagtagctgttcactgagtccagcctggtagtccagggctcccctggcccaagtggtctctatggaaggtgcagacacagaggccccatgcagatgccataacagatgtgagagcatttggcaaacaagaaacttccatcagacatgacaatttctgctatgatgcttattgttattactgcagtcattgttgctatcaccgtcattaatacaagcagtgcttgtttgaaggagatggcctgattggaaaacaggaccaggcttgcacgcaggatcagggtgtctgcagggagcaatgagctcaggacggagccgcagccttcacttgatttctcgccgttcctgggtctcttcttaccacatccaccatgtctctgggccctttaccgctcactaattatattttcattacatccacttaccccttttacagaaccaagtgtgttttttttgttagttttttgtgctgagacaggatcttactctgtcgcccaggctggagtgcagtgacgccatcatagctcactgcagcctcgaattcctgggctcaagcgatcttccagcctcagcctcccaaagcactgggattacaggcctgaggtaccatgctggacctgtgtcgttaaaagaaacattctacaattatcaccaatgggaagcccctattattagacatagataggaaacaacagttcaataaatacaatgattaaacattatttgtaaattgtagctaaattcagccccatgccccagctctgaggtaggtatcacttaacagaaagcctcaggatggaatgaaaaatgtagaggggtaattttctcatcatggaatccacgtcatttgctactttgtgcctcagctttaagtctctggccagccattttctcctgttgtgtgcaagttgatctaaaaatccccacccaggccccatcccacattcctgcttcctgccctcagggcaccttgcttggctgctgttgaatcagccttctctcctttctgttttttttaaattaaaatagaatttgtttatttttattgatatataataattatacatatttatgaggtacttgtgatactctaatacaggcatacaatgtgtaatgatcaaatcagggtaattagcataaccatcaccttgaatctttatcatttctttgtgttaggaacattgctaatcttttcttctagctattttgaaatacacaatatattcttgttaacaacagtcaccctactgtgctatcaaatgctagaacttatttcttctaaccgtatgtttgtacccatttaccgacctctcttcattgccctgcccacagcccccacacccttcccagcctctggtaactatcattctaccctctactgccatgcaatcaactttttagctcccacatgtgagtgagaacatgtgatatttgtctttctgtacctggcttatttcactcaacataatgacctccagttccatccatgttgcagcaaaggacagaatttcattatttttactggctgaatagtattcctttacccattcattcatgagtggacacttaggttgatttcatgtttttgcaattgtgaatagtgctgcagtgaatatgggggtgtaggtatccctttgccatactcatattctttcctttggatagatactgagtagaatgattttatctcctttagtgccttacccctgttccatagagtcacctcccaaataggccacctccacataaccctgggctccagctcagctttcaggaaaatgtaggataaagcatggtatctttctagcccctaaaactgccttgtgaaccccaaagacatgagtcctataacactagctccattacctgttaactgtgaaacctggaacaggtcagttagtgtttctgagcctgcttgcttgcatgaaatactggtaactgtgcttaccttacaaattaataggaagactaaatgagcagacagcatacagcaacagttttaggagaaggcagtggttaggctgggcatggtggttcatgcctgtaatcccagcactttgggaggctgaggcgggtgtatcacgtgaggtcaagagttcgagatcaacttgaccaacatcgagatcccatctctactaaaaatatgaaaattagccggtcgtggtggtgcatgcctgaggttccagctactcaggagactgaggcatgagaattgcttgaactcaggaggcagaggttgcagtgagcagagatcacaacactgcacgccagcctaaaggcctgaaggacagcgcaagactctatctcaggaaaaaaaaaaaaaaaacaaaacagtggcacactcaaggagcccacccaggtgcctggagactggcttttggcctgcaggtggtggtgaggcagtgcaagtgtgacagctgctgacaatgagatactacctgcttttgcagaacacacagatctatagcccagtgtcagccatgggccggtgctcacctggcgtttgttgtggtgctggcccagctgtccgcattgttggggatgttagagtggccccttctgggtggaaagtcgaggtccgggaggtctctatgtagctgtcctctgtctgataaaggatccttggggctgtctgtctggccactccggaaaccatgggccattgcagctactagctcagccctgatggggagccccgcagatggggcttgagtccttccacttactcttctctttctctgcctcatctattaccactccctgctggcctcctctcttacctgcagccctcctgtgcatccagctggaggtctggccacaccaacagctgacctggttccctagactttccagcccatgtcttggacatgcagttcccaccctccacttctctgcaaattcatcgtcttccttctgagactcctgtccctcagatctcctgcagagacctcaccttgccatctgatgactctgggatgcacctcccccctcagcctgtggattcctagagggcagcacctagtctctgttaactgccccctcaagcccagatgctgtgaacaggagtcagcattggctgtgtacctggctgcctctctgccccctgccctcaactacctcgtcccactctgccctgggggtggcttcagatgagtgaagctcagctctggacatactggacagattgctgttccccaactgtgtcagacccattgctgccctttgcacagtcattagctctaataattactgcaggtcctcaaacacttgtcattcaggtctcagttcacatgtcacctctttagagaacttccccgactacccattgtaaggttccactccctccgtctgaaatgatctgatgtgttttcttagtaatgcacgctctgcctccactctagagcatgatgactaaaatcctgcttatcctgttccccctctacccccaggttgctggcacagggcctggcccataggaagtatctacatgtattgaatgaatgaatgaatgaatgaatgaatatataaaccaatcaatgaaaaaacaaaccaatcctaccaaaagcctcaagacagacacaggtgggaggactgggtaggcattaccgtctccagtaacagatgaggcactagagtcaaagagggctcgcgagtgagagtgacagcctggagccagcaacactgctgtttttcccctgggctccttctctgacccacctctacccaccagtgaacccccgctggacatctggaaagggcatcttctccatccctgacatcactttggtcagaactgcgctggcctcactttctgattcataattcagcaccagcagctcactgctccagtcaggggtgaagcctcccattcattcaagatgtttcagaacgcctgctgcattaccccagaggcagcacagggcttggtacaaaggtggatgcatcacaggccctgcatccccggtattgatttctatatgtatgtcccgcttattagaccgccagaatttatcaggcagagaccaggtcattatttcagaatttctttctatttccccctttccctaaaatctgagggtggggtgcttctggaaaaacaatgcgggattataggtagacttttctacaaaataaacatgatggcatgaaagtactaaaggaaccaagatgacatcttcagaatggttattttcagaaaataattcattcaagaattgataaatagccctagtgtgatagagtgtttgggggtgttttttgtttgtctgttggggggcagttattatgaattgtcttttattttaaaaaatagtgtcaaatactatattataattagatagcaatttttacagttttattgaaatataaaggatacacaaaaaacagcacatttaaaaaatcttttactttaagttctgggatacacgtgctgaacgtgcaggtttgttacatgggtatacatgtgccatggtggtttgctgcacctatcaacgcgtcatctaggttttaagcccggcatgcattaggaaattgtcctaatgctctccctcctctttccctcaacctcctgacaggcccctgtgtgtgatgttcccctctctgtgtccatgtttaatgtgtacaatttgatgagtttgaaatatgaaaacacctgtgataccatccccaaaatcaaggtagtaggtacacttaacatctcctggagttgccatgatgcttttttctttatggtaagaactctttgcttgtttgtttgttttgagacagaatctcgctctgttgcccaggttggagcgcagtggcatgatctcaactcactgcagcctctgtctcctagactcaagccatcctcccactccagcttcctgattagctgggactacaggcatgagcccccatgcccagctaattttttttttgtagcttttgtagagacagtgtctcaccaagttgcccaagctggtctcaaactcctggggtcaaatgattcatccgccctggcctcccacagtgctgggattacaacatgagctactgtgcctgacctgtgataagaatccttaacatgaatgagatccaccctcttaacaaattttgagtgaacaacattgttaaccataggcactatgttgtacagcaaatctctataatgtactcatgtagcataaccaaaattttatacccactgatttttttaaatatggtgaatagacaactattttctctttactccaaacccagagcttctaagttggggctcttaaccttgggattgaacctgacctgcaatctatgctgggatccacaaaaatgcttttttgtttgtttgtttgtttgtttttgttttttttgttttgttttgttttttgttttgaaaaaggtctcactctatggcccaggctggagtgcggtggcacgatctcagctcactgcaacctctacctctcgggttcaagtgattctcctgcctcagcttccagaatagctgggattctaggcatgcatcaccactccaggctaatttttgtatttttagtagagacagggtttcaccatgttggccaggctggtctcgaattcctgacctcaagtgatctgcctgccttggcctcccaaagtgctgggattacaggtgagagccaccgtgccctgtccgaaaaatgctctttctattgctgctgggggggtaataatactgctttccaaagagctctacagtttgcaacaagtcccctcctggctgtggcatgagaggtacttcctgagggagagagaatgcatgtgatgagcggatcacactacagtgtgtgacttgctcactgattccagcattcggtttgggctaaactgtgttctttccattatcttggtttaaaaatataggttttttttttcattttttaaaaaatcaggattttatacatacctggaaaattaggaagtgggaccatactgggcctatagttctccaacaagagctgagccatgctctccccagcagatgggctcctagatcctgtctgctctggtcctcacctggcctgctttgctctttaggcctctttgtctgtgaccctggtttataagaaccatgcttcccaaccttcccccctaaataccctagaccacagatcacccctccacagtcaagcagctctgggaatagtcaaggttcctgcataagcacattattttgaaggcttaggtttcatcttgaaaaaaatgtgtgttccattttattatataacagggctatgtatattttaattaaaatttatatgtttttcttcccaatgtatggactaaaagtgtccctccaggaagatgtgccaggctgttctgaggctctgagtgttccaaaggtgttagctcagggtgccttctctccagtttgaaaaatacagtctctcccagtattgttgctcatcatgtctttagttcctttttaaaatcttccaagttcttaacttttgggcactttttaaaatcagaaattaaatgcccttaatttgggggagttgatatggccctcagagctacaagcccctttgggctggccccagtgcttgtgtggggaaggggccaggccccatgtccacatgcggcctggctggctcgtgcgtggagctcctgggcatcacacactcagcttgcatagcgctgccctcagaaacttttgcgggttatggcttatgaagggttccggagagttcagacgcaaatcgatagcatgcattacaagagagcgtgagctaacaaaggtgctgggggaccatgcatcttaaaacagcttcttggggactttaattgtcgggatgttcaggagaagaatatgaccttacggggcattttccagaatagaatagtctatatattaaaaggcagcaaatgattcataactggttagtggcggggcctatgggtccatgtttcccatgtgaatttttttttctgcgttgcaaactcttacattaaattgtgataaatgaagagtgggggctactcatacaaatcaatgactctagtgtgtgtgtcattagcctgagagatgcaggcagcggtcagtcccataaatcatgtgatgatctgctgtctgcaacacgatgcaagcaagcaggcacattagggaggttaaggaatgaaattaatctgtgcattttcctctccccctgcctccttccccatcacctggtcatacggaaagaattaaaatcacatgatccgaactaaaccagctccagaacagtaaattggttaagtttgacttcacctttcaactctgagttaattatgtattaggggattaatttattcacaggcactgggaagggaaatggagaatgggagaaacctgccagggcctctcatccagatgccaaagttattaattgctctggctgtgccacaggctacctggacagaccctggggtggggggctatgtgatcggccatggatatggtggggtctgtcctgctctgaggatcagccagcttgggttacagaagaggccccagtctgtgctccacagggatgcttgtgatgcttggttgctggagtatcttggaagcctacgctagaaggagcctttccccagggtgtgtagccagattacacttcagatggtaactgatacctcttccaaggccattcgccttgcctggaattcctccagtgagaggcagctctccatttgcgaaactacccattttacacatgcaactctgatttgcacaactcaagggtcctactccacccccttgggatcatatggaataccaggactacgtctcccacgcatacatgatgccctctgttcacccgaggacagggagcatgttctcctcaaacatcctccagggtgcctctccaatggcagcctttggaggcctcttgcctttgtggtcttcctgggaggtcagtcttgatctctcttctgtggtgtggtcccagccgagtgagaacagctgcaggtgcagcagtacccaggggctcctggagatgagacctggagcagataggggagctcctttctcagtgatgctacctggtggtgattgggcatcagatccagcaggaaaccccaggaaactcctgcctatttaagggtctgaccacaccagaaacagcctctcaaaagactccaaacgctagcatcatctgcatggagccatgcaagagaaattgttaggtatatttgtccatttgttgttaagacagaaggatgctgaatggatttgacacagaccctttgcttataaaaactcacaacaaccaacatgaatggcagcattaatgctctgtgcgtgaacagcacttcacaatgttctaaatgcgttcccatgtgtttgggatattgtttaatcttcccagcagtccatgagttgggtccaatgattcccatttgactccctaaggaaactgaggctctgagagtttaaaagacttggctgagttcacatgcctgggaagtggctcagccaccataagattcagttgcaggaaggatgggaccatctagggtctttcttcctatcaaatctacagatggaaagttctcagagtccaagcacccatgaccatctctagaggctctatgcagctcccagatccgtgtgctgctccaatagggttacaaaaacaagttgagctaacatctaaaaattaaaagctttcatagaaagaagggattttggcttctcttgaaaacttggaatctggccattgggctgacatttcactgtggtgatactgggttcatgatgagtggtggctccactcaaagggctctgagctctcacaggctcaagagacatgttttgggcagtacacacactgagacactgaccccccaaatcctcactctgtgcaatgacctaatggccctcctctcaccctcccataacccagtcttactgctgcccccacctcctggggaacccacgcatctctgtcctgcccatacactttctctctctgtccaagcccttcttggcttcaagtcaagctctggtcatttcactggctcctctgccagccttctccttcctaagctccaaaaggatttttcagctggttgatgcgggtgagcacgccagagccagatgcaccctggagacatctaaatccaaccttcttgtctgtagtaatgaaattaaggtgagacaggttgcctgaccttctatgtcgccaaccccattcccagaccctctcctggccccaagaagccaccctgatcatgttgctatctgaatgttcaccttggttgctcttttggggaaaaaataccaaaaacacagagaaaagggaaatatcaaaatccgcagcattcagaattaaccaaaaatcaaaatttgccatatttgttgcagaagtttaaaaaaaaatcaagaaattctgagttccatccaggaagctggcttcattatactcttaaggtctccacacatctcttcctgatccccttccattctcttcttccagaaggaagcattattgtgacttttcctccaaatccttctaatctatgtttacacacacacacacacacacacgcacacacgtttgtaaattacatatgttttttggttacatgcatgtgtttagatctacataaaacacttctgcttttttccatcaccattgcattttttaggtttttacggtttggctctgtccacccactccaaatcttatcttgaattgcagttcctgtaatccccacatgtcatgggtgagacctggtgggaggtaattgaatcatgggggcgggtttttcctgtcctattctcatgatagtaagtctcacgagatctgatggttttataaaggggagttcccctgcacacactgtcttgcctgccaccatgtaagatgtgcctttgctcctccttcaccttccaccatgattgtgaggcctccccagccacgtggaactgttagtccattaaacctctttcctttataaattacccagcctcgggtacgtctttattggcagcatgaaaatgaactaatacagaggtcgactcccaccctcacctgtaaatccagcctggccaaatcccatcctctgagggatgtaggattttgtttcccagatcccctttataattacttaattaatattttttagacagagtctcactctgttgcccaggctggagtgcaatggcatgatctcggctcactgtaacctccgcctcccagattcaagcgattcttccacctcagcctcccgaggagctgggactacaggcatgcacaaccacgcccagctaatttttgtatttttagtagaggcagggttcaccatattggccaggctggtctcgaactcctgacctcgtgatccacccaccttggcctcccaaagttctgggattacaggcatgagccaccgtgcccggcccccctgatccctttttgatgggcatgtgcattgtggattttttactatcaccaatgaagctggaacaaaactctgcatcttttctggggtttgctaatgaggtctgcctagagttttatttactctctaaatgtgtcatgggtccctctccccagtgggactgagaccttctgggggaccctagggaccacatgtgaagatacccagcacagcccccagttggtccctcagtattttccctggcatgtgtagtcgcatctctcccttagctctccactgaggctgcacgtgctggtcacacagccctccagctggctatgtccccacatgtaagccccagggagccccagcctacggcctgtgcgtctcaggcccattaaacctctcactttgtatttcctaattcctttaagaaatcccaaacctgtctccttggatagaaataaaataaatgtaatatctattgctatcgcttaaatacaaattatagtattttttattaaatactctcttgtcaaatgcttgacattcctcataatagataaaaaaacaactaaaactagttattttctgttaccttagaggcttgcaacgtagtttgtattgtatttacttgttatgttctgcttgtcgcatttcattataagcacgtgaattattttccctactaaattaaaaggcaatatccccgcccccagctacccttgagcttgtataaaaggtgaagatctggagctatgggctctgggaagccacctggtgatcagggtcacagatcctctgccagctcacagtcctcctctggcataggctggcccagcccccgtgcctggtaatggggtcaggggaaccaccccaataaactttgtggtggggaaaggctacatgtatcattgctctagccttacactcttttcttcccactgtttcttatcgtcatcatagcatccctataaggcagcaggttgggactactgtacccattttacagatgaggcaacaatcctgaaaggaacttttgagttatggtcaggcttagggctagagccctgcagattccatcgcttccaccagcactgttgccacacacatgtgccaactggaggttaccgtgcaccaggcgcttggggaatcttttcacgtgcaatgccttctttgatcctaacattagttccttgaggtagaagtactgttatctctcttttatagtgttgatgaaactgcagctcatggaggacaaagaagtgcctctggttgtataagtttcacatgcaagagcagaggttggagccaggtctgtctgactttagagcccagttcagaagcagtgagaagaaacatcttcagctctttggggtcaccatctcttttaagaatggggtgaaatctgtgccctgacctccttccctcagggagtgcctatttctcacatcactggcattttacctatcattttgtgagctgctgggactagctggggctcatgtctggacccacacaagtcctgtgatccaggtcagaaactccctcatgagagcttggaatcagatgcttttgttgtgtacacagcctaaatcaattgcaacctcaccaaatgctctgtctcctgccctcctttcctgcataagctctttctggtagcttagattttccagactcagaatttgaaatgggttccagtggaacttgggagagtggagtttcttacagtgctgggatttgacctatttttctctgagcccatggggacttggagagtaatgagcctgtgcacccctgtcagatcctcctgctctttcagtgctaccctccctcccgtcatggcacttctttgaaagaggagttgatacctgagtagtaattcatggtgcagatgcaccgcgttttccttacccactcgtccactgaggagcagttaggttgggtccacatctttgccatcgtgaattgcgctgcaatcaacatacacctgcaggtgtcttatttataaaatgattgcttttcctttcggtagacgcccagtatgggatggctggatcaaatggtaactctacttttagttctttgagaaatctccatactgttttcccatagaagctgtactagtttacattcccatcagcagtgtctgagcgattccttttcaccacatccacccacacatctttttttttttttttccttttaaaacatggccattctgactagggtaaagtgttatctcattatggttctaacttgcatttccctgatgactagcaatgttgaacatgttttcatctttgttgccatttgtatatcatcttttgagaaatgtctactcatgtcgttcactcacttcataatggaattatttgtttttctcttgctgatttgtttgaactccttgttgattctagatattgatccttttttgggtgtacagttccttcagatcacctgcaagcctggcaggttctccagccaagagcccagacaggcttggtacctggcagaaagtcatgaaagctcagttttcacatctgtaaaatgcagaaccctttccgggtacttccatgtcaatgagagaactctgactcctttatttctaaggaccacataccttactatttctcctctccctacacatttagacagtgggcctctggtttgaactgttcttgctgcttaatcttacagagaacgttctcaggattccccctatcttgatgtgtctctctgcatcagccactccatcacctgaaagctttgtagtaacacagcacctctcagctgaggcttgcttctcttacacaagtgcttcccagcatgcactgataacactcggccacacagggagagaggagctgataagtccacatgcacatcagaaaatgatgccttttaaatgcaacagccaccttattctggaggtaaatcacagcactgaaaaatatctacaggtacctatggaggaggaagataaaagaaaaaatacctttttttggatggaaaataagaagccaagaagaataaggttttcatgcatggactatgtcaaggtcccacgattgccaccaagaccaccatgatggaagcatcttcttcattggccaatggacatcagtgcaaggatggtcgtgcatggaaaagaggaggcagaagggcgggagggacttggtcagccttcagagtgagcagactctaaactggacttctacctggcccatcagatcatactgctcatgcagtctgtttgggttttgtttcctctggggacctctttcactcccacaaatatcctacaacccttgagtaggaattaaaacccatcagagatcgaaatagaattggttatggtaaaagggagctgaaacagtgagaaagggaggagaagggaagaaagattaaggcagacaagggaacctgtggagagagtgagagctagagacagaaggagagaagaggcagggccgtggaaacagacacaccatctctccaagtccttctcaaagacactggaagagttctggaaaccgaacaggtatggaacacggcaagtagtggaatggagagctcagcccattttctggatttttagggccccagatcacacatcctggaatttctcatgttgttctctttatctttgttacccatccccgacctagattttcagcctgcaaaggcactcttgctttcatcaaaaccagaattcccactgtgtttttgtcaagcacccttgccttcctcctgggattctcatctgccttttgtttcaattctgtatctgtctgccctgtcttcttcttcttcttcttcttctttttttttttttgtctcactctgtcacataggccagagtacagtggcatgatttcagctcactgcaacctccgcttcctgggttcaaacaatcctcgtgcctcagcttcccaagtagctgggattataggcatgcgccaccatgcccagctaatttttttatttttggtagagatggggtttcaccatgttggtcaggctggtctccaactcctggcctcaagtgatccacctccctcggcctcccaaactgctggaattacaggtgtgagccactgcacccgaccaaccctgtcttcttctttaggtcagaattatcttgttgccttcacagaccacagctggtcagctgcttcttccaccactctgacgcaactcaactcagtccatcgtctccaccccatacaaggaaccccagttggccagcaaggtctccctgacaggggaagcatttctctaagctcagaggggttgacaaagtggaaactgcccactctggaggtggcttcttctccccaaggccagcacagaattctcctgggctgtggcattctcttggagagcatcttgatgcagatgaagggtgctatataaatcaatggatcataagtctgttggacagcacttatataggtaaatgcatgtatgttattcactcagtgaaccttcctaaaaaagataatatgctcaatatctcaccgtgctgacatatttcaactcaattgataatgggtcaggattgagcaaggcttacagagtgaattaccttttagccatcccttccagtttagggttgcagtcaccaacaaaatcaatgtcgaaggattcttgttgtctcaggcaataccaacagtgactcctaatgaaataaaccattgaaaccttttaatcagaccacctgcctaaaaggaggaagccatccagcggaggctggggctctagggatctattttccccttaccggtcaacgcatgagtgattctttaattgtagtaatgatgtgcttaccctggacccagacacttgggcagcaagaggcagcaattctctggggcagagggttggcgtgacctcagctggggctgcacaggtccccgagcagggctgcatcaccaggggccatgcaaatgcctccaggttaggggcctgtttgactcccagacatgtgataaatctaaatctctattgaaagaaagccctgcaataaatgagccctgctctacatctgaattctagagtcactgttacaaaaataggagctggctgcaaatgtgaccatcaatgggctcctgcctctaccccttgctcttccctcctccctgacctgcaaatttctgaaaaattagctaacatcaccttaaatatatttaaatattaggaagccaaagggagtccaaaaacaccagaattgacctagaagctctctgcaaggctctcttttgtgtccactgattcactctgaggcacatttatggtttccttcttctttatggatcattcctggattttctttggaaattcttctttccctcatgctcctgtctgagtgtgctcttctcttagctctgtggtggacctaggattcaggtctgtattagtctgttttgcattactataaaaaatatctgaggctgggtagtttacaaagaaaagaggtttattcggctcatggttctgcaggctgtacaagcatggcaccatgaattttttatggagaggcctctagaagcttttactcatggcagaaggtggagggggcaggcatgtcacatggcaagagggagcaagagacatgccaggctcttttaaacaaccagctcccacgtgaactaatagagtgaggactcactcattaccatggggagggcaccaagccattgatgagggatccacgcccatgacccaaatatctcccatcaggccccacctccaacactggggatcacatttcagcatgagatgaagaggggacaaaacattctaatgatatcaaggtctaacttagtcagtagttgattccctaatgaatctcatcctgtcaaccagagtgtcaactcaggacttctaatggggtgactaacagagaaaggcctggttctctctttccaatcagacatggacctgtggagtgtgtttctggttggtcattagctggtgaaaagcccatctgaaaatgtgacccacaccaaggaagttgagataagaggctaaggcagtgattccaagcctcaggattcctacctgaagttctgacccccaagcaagatcttcttggattatttggtttgtgagtcaagaagttccctcttcactctggccacttaggcttcttaggcttggttttatctccctccttgtcctcttcctccctcctcctccttctctttctccttcatctcttcttcttcttcttcctcctccctcctccttcttctctttctccttcatctcttcttcctcctcctccttcttcttcctcttcttctctttcttttcctcctacttttcctctctctctcactctctctctttctctctctctctgttgtcacaggcaatcaaagaatcctaatggatttcacccacctacaaggaaaaacccatgagcattgggaaataaggcttctttacatctgaggaagaagcccttcctgggaatccactgaggaagggctcctgtgctcctgtgaccacagcaccaatccatgaggctactggtttgagtactaaccaataaatttacaaagagccttttaaaaagccctaagaaagaattgagggcacagatgggaagggaactgcctttcttggtaaacaaattaaaagaagagccactatctgtctagctggtcatactcagaggcacatgatcccttgaagtcccatttttctgattgatgatgatggctacagagaggagctcctgctatggataactttgttgaatccccaatgtgtctagaatggccaagaatgagtctctcagcagccagcaccccttaacacttcccatgaaagatctttcgggtccctagaaaagatccgttcatacgctggatagctggatcagtggagatgacaaataaggtgatcaggcatgccagtaagttggaagaaaccaaagtcaaaccaacagagtatgagttctcctttcccttgggtctatgtggaagcttcctagatgtctgagcacccagaccccaataacttcctctcacccccagccctcttttggggccagtgccatgggaccagttagtgcaatggaggtccagcattctgcaggatccttgagtaggaagctggtggagcacccaccgccctttgtctaccacggtgatgaatggttgttgacaaggctaaacaaaggtattattagtagattacatctgagaggctggactcatgcagaaacagggcagcaagagccctgggccctgctcagcccccaattagtccacaaaagcctaaaccaccaggtcagggataaaagtgaataaatgtttctaaattcttatcttaaacacacttaagcttaaagctatttaactggagctttaaaagcatgtgagcttcctggagcccagctacctgcctcattctcttgctcttatttttgcttttatccttttagtctgaagaagcctaattagaagcctgaacagggctctctctccctgcccttaaatcagtaattggcttcagtgcagagactgtcaggaaattaacacatcacaacatgacagctgttaattttttctccttatttgtcatatgaatcaccgctgatttgccggagtgcataacaaattagtgggctgtaatcagcggcctctcttctgtgagctgcaccttccctttttttttccctttttctcccctctctctctttttctctctccccctacagtccattacttcactgcctcagcagagatgactgctcctaggtgtgtcattgtcaataaatcagaataagcaaatgctaaaagcgcaagaagctctttaaactttgatgaaggcttttagttacatttttaaacttacactcataacttgaatctttttttttttaaattgtcactccccggtagtgatagactgtcaggtttccagtcatttcctcatccaacgtgccagggaaggtggaactccaagtgtcatttgcacaagttctggctgacggaggaggtggaagaggtgttaaggaaggcaggggaagggagagatatcagagattccaacagggtcagaccaaggcactttcccttttgagtgagagatttaggggaggccaggtatggtggctcacgccagtaatcccagcaatttggaggccgaggtgggtggatcacttgaggtcaggaattcgagaccagcctggccaacatagtgaaaccccatctctataaaaaaaatacaaaaattagccgggcatggtggcatgcacctgttgtagtgccagctacccagggaggctgaggtgggagaatcatttgaacctggggtcaaaggttgcagtgagtcaagattgcaccactgcactccagtctgggcaacagagtgagaccctgtctcaaaaaaaaaaaaaaagagagagagatttaggggagagaggaaaacaggaggaaaaatgggaggtgtacacacagggtgggaggaagagacatggattctggaatctcatcctcctcaacctttccaacttgatttattgtccactatatctgagtcatttgaggagtgtgggcctttgtttgaacgcctttgtagggacagccaggactaccaaacagagtcatgggttctcagactttatttctcattcaaccttgcagaagacatattggtgggccttaaactcaatacttatcacctcctgaaaggaggaagcataggaaggatggtagcactggaaggcttcaccatgtgggtttcagttctagactctaagatttgccaaacaaatctgtgttctctgcatccatactgtggatgcagaaggggaaggcacttcttccttcttccttctcagcctggacctattgtactgacaagcccatgtcttcctaacctggggccagtagggagttggtggtggcttcacattggggcaccgcctctcagggacctatcagcatgttctgttggctattacagactgatgttgaacctaggggtgagagtatttcaagggtgaatttcttctttcctttcatttactacccatccatgcatccatccatgcattcatccatccaccaattcatccattcattcatgcaccaatttatccatcaacccatatacccattcatccacccacccacctatccatccatccgtctacccatccacccatccatccactcattcatccatccatttactcatccatccatccatccatccatccatccatccatccatctccatccattatcagtgcactttgcatgcagcagcatggcatgagcccagtgcatgaacaggaggtcagagggagagtgtgggaaatgctatctatctcaagataagcccctctcaaggtactccaggatgtccccatggtggacatggaggagggcgaaaaagccttgcattcttaaccatagccataagcaggtgggttattctatgtatccatattagtcttaagtcatccttttcccaagagttactctaatgactttcttgcactaaattctaatttgctacttgagagttgagtttggttcagtttatcgagtacattagcaggactattatgcactagatactagtttaggagcaaaaaattcaataaattagggtctatgcccttgaaaattatataggttttagaaaagctgtcataattttaaaactatgttttattcgtttgtttttcaattctcaacacccaggatgtggaatgtatgccctgcaggctggtctctttcctgagagctgagatgtcctgtcctaaggtacacaaaatagtcttctaaacatcagccattttaatagacagagccatgaggtcttgctcatgtgaaagccactgaaatcttttggaaatataataattgtcttttttttgcttgtgataatttatgtatgttcaatgtatttaaatacagtttaatatgctgcatcttataaaaatcactgctgagaaagtttctgtctaatgtcatttttgtaagctccaagaaagggtttttgagcaaaataccaattttacaattactccgttgaatcctaatttaagaaaagaatcatttattcattatgtgaggtggaaagaattttccaggagagactaagattgacagtaatgaagtaggagcttcacagaagaagcggtagtgggagttttgaaattctgggaccagcgcaggcccaccataggtatggacacctggctggtcctgagggcccccacaagagtggggcatatcaggttagatgcctctgaagacaataaggatggattcaataagtgtttccaacacttggcagaatccagtggaccaatgaatcctgccacctgctggctggcccttgaggggaagggcgctcttcctctacacagtagtatctctccagcacaagctgacttcactatcctcccattcctgctgtctttgacctgtagtcatcttctattcctacgttatacagagcttgcttttctctgagcacatcctttgtactcctctcccttcttaatggctgtatggaagccatgtttcttgattaaaaaacctccttaaacacaccttatatcttcaacgtccatgctatagtgactgctgtggtcttggtgatacactttaggaagaaactttccctgcagccctcgagggtggcatgtcaggatcaggagtttgtgtcttctttgtatcccaagacttttgagaactatttctacttctgcctctgcaccttttagattagcaccatctggctctgctaccctctacttcttatgatccccagcatttaccactctcctgggcacttttgccattcaccaagaatcatgagaactgggtcaacatcctcctctaccaccaaatattgtcattatgaagggtgaactcagctttaacaaggatgatctgtagcccatcactgttgtgttacagatgactgatccacttgcccatctcagtgacctcaccctactttagccagccagccaggtgctggaccatctccgcccctaggtgcaccataccttctccccaaaactacaactctctcaaatcttaaatgctagaaccatctcattctcaggtccaatgtcttatcctagctctcttaaagatttcctcatttttgtacatttacttctatttttctgagacttctgggtcttggatgctgatatcatttgtattcccacccaaattttgacctgtcatcccaagatgtcaagggagggacctggagggaggtaattggatcatgtgggaggtttctcccatgctgttctcatgatagtgagggagctctcacaagatcggatggttttatagggggctcttcccccttcacttgcttgctgtctctcttgttgctttgtgaagaaggtgccttgcttccccttcaccttctgccctgattgtaagtttcctgaagcctcctcagccatatggaactgtgagtcgattaagcctcttgtattagtctgttctcacgctgctataaggacatacctgagactgggaaatttataaaggaaagaggtttaattgactcacagttctgcagggcttggggggcctcaggaaacttacaataatggcagaaggggaagcaaacatatccttcctcacatggtggcagcaaggagaagtgcagagtgaagagagtgaagatggttataaaaccatcagatctcatgagaactcacccactatcacaagaacagcatggaggtaactgcccccatgattcaattacctcccattggatccctctcatgacacgtggggattatgggaactacagttcaagatgagatttgggtagaaacacagccaaaccctatcacctcttccctttataaattactcagtcttaggtatttctttatagcagtgtgaaaacgaactaatacagatgccttctgagcatcttctgagattctgaatagaatcttctgagcattctattttccttctgagcagtgctttctccctttgtttctccatctcatctccatggtcttttgtttcaaccattctcatgccactgagtctcctctatgacactcctcctttgcttgtttatgcctcacccaggcaaattcttattcttgaagcaatctcttcattccccacctctattttcactctgagttggcaaggaccactggagaaacatcacgcaaactttgcaaagcttgcaaactggaggcaccacaaacacaagttctttaggtgctgatgagtcttctgcactgatgagcactcctgcaaggtttctctccagggcagtaaatcctctgagtggttattccaaaactccttaatggttttccagtcccttactgccacctccctccctcacccttctccttctctcccctcttggtgggaagtctgtccccatgttggaagtagttctcctatccccacctccctccctcatcctcctccttctctcccctctcacagcagaaagcccataccctagtgttggagatagggcctctcaatttccctctgctccagtcttcccattcctgccccctgagcaccatggctgggtggatttattccttcatacacacacacacacacacacacacacacacacacacacacacactacccaggctggagtgcagtggcgcgatctcagctcactgctaagtctacctcctgggttcaagccattgtcctgcctcagcctcccaagtagctgggattacaggaatgcaccaccgcacccagttgatttttgtgtttttagtagaaacgaagtttcaccatgttgcccaggctggtcttgaactcccatcctcagatgatccacccgtctgggcctcccaaagtgctgggattacaagtgtgaaccactatgcccagatctcttctagattttatcatctcccactctttatctctctttgcttattccttccaacaattaagcatacttaaacatcatccacatttatgaagaaagatatctcctacagccctaaggacctttttgtcctcacaaccagtaagtttctaaagagttatcatctcttgctggacccacttctcatagctctattccctctttaacatactactgtttgactttggagccctccatctctcaccaagattgcttaaatgcttgcagacagataacacttttcaattttcagctaacgtgttttatttttccgcaagcatgagggcataactacctcttgaaaatttgacttacgagacaccacagcctccctgggttctttctttgctgcctttctggccattcctttttgggctccttcggagacttctcatgatctcctctctctctctctctttctctctctctctctctctctctccatacaatatgtcatttccttggggttttattgtattttttctctttaccctacgtactctgtaggcaagcttggcctctccttttgggcttcaaatatgactttaagcctaaactttctgggcatctactcttggatatctcatgagtatctccaaagcgaacctgccgtctctctccccgtcatcaatggacttcggttcttttccagggatgaatgacaagaggtcatcctgggtttcttcctctccaatacagtcactgtctaatcaatcaccgaattatattgatttcccccatctgtccattcttgccgttcccactgccatgaccctgatccaccaccactactttctctcatttgattaatacaacagcttccatcttgccagccttcactatacccaacatattccacactgcagccagcatcctttttctcaatgcaattttatttatttattttgaaatagagtattgctctgttgcccaggctggagtgcagtagtgcaatcatggctcactgcaggcttgacctcctaggctcaagcaattctcccacctcagccttctgagtagctaggactacaggtgtgccccaccatacctggataattttttaaattttttgtaaagacagggtcttgctatgttgcccaggctggtcttgaactcctgggctcaagcgaaatttgaccttgtcgcctgcaggctgagacactgctgcagactgccctcatccttgatgtggtttacaagaacctttatgatgagacgtcagcctagggtgggtcctcatttgcccacccacatcacaggttctaatccagaaacactgaattcattcagtttcctgaagttctgatttttctctactctctaggcctttgtccatggtattttctctacctagaacaccgctgtctacccatttactcctcaggtttaagctccactgttgcttcctctgtgtagccctccctaatgtctgtccccacctcctaatctcccaacccagagattggggcctgggtttctgttactagcaacacagccggatgtggcagctcacatcacgtggccttgatgacatgtctgtgccacatcaggccccactctgagaagacagtactctgtgttggggtagaagctccgttgtgttcattgctggagccctgccaagcaccacgccttgcccaaatagtttctctggaggtgtcagtcgagttggtcagatgccttagtcatcggtatccacagggacagacctgaaggtgccttttcatatccttgcctgcaagtcagtctgtgtcttagactctaaagtttggaattaaatttattatctacatatcttttggattttatctaattttctaagacagctgggtcaatgaaagtatctttatatccccaaataaaaactcacaagcacttagattccgcatgaatctaagtagctggtgatttcaatctcctagcagatgcttggccctgcaataggcccagctgggctgtgccctagggctaccgcccctcgcacatgttggaacccacccctggtattctggagaagccctctcagctagaattattttcagttcagcagttcctgaaaccctagagcctgtagagggaaaaacagaaatgatttccagtccagggcaaagtgaggctgcatggaaaaagagagaaagtcagttgttggacggcatcaaaagtcagcctgttctattaggcaaaaataaacagaggcaggcagaaaccaaacaagacaaaaatgttcattagctgcgccaacccaggccacccacttcgttgaactgaccacatcacttcgagattccctacacacggccccacccttccctgctctccccaggggtagacaaggcatcagagtggaaaggaagagaccagcttaaaccagaataacctccatcccccacttccaaagctgcccagagatgggctttggcagcagatccaccaagacgtcagtcgtgggggagttccctgcctggctgcctcggtttctccttgatagcacagactcattgttatccgtttacggaaatgagcctaaaacaggggtcagaacagatcagtatctgtggggaagggcagcattctttggagaggcgtattcaggattcattatctctttataattaaaaacaaactatgttttcccattaaactttacagaaagttaagtccaattaaagcatctggcctccttagggagtgcggagatagcgtcctcattagctcctgcagcgactcttggggttgggggaggaagggcatggagattttactttatttgtttgttcactgagttttttcctcactccaccgtcatgtgaaggtggggatctgcacattttgctcaccactgtattctcgactcctagaacagagcctggcacgtgtcggacaactgtggagggaactgatgagtgaaagagagaatggagaaaggaatgaatcagcataagccccacagggacaaagactgtaactggagcaccctttcatccccactgctggacacagggtggggaacactaaatgtgcgctacgcattgtttatcgaaacaggctctacatcaaaataaaaaacaaaacgaaaaaacaggaagcttttctggatcaaggctagcgttttacagttgagatatggaagcccaaggaagaagggaaatttgagatttgcttgtagcctctgagctggtcagctgggaggctctggccaaggtggggttgttgagccccaggtaaaagccccacccagcccctcttcttgctgtctgcaacagggcagccacactctgtgctcaccagggagtcttatctggagttcaagtcccaagacctgaccttcggggcctcccaataaaagggcagagatctttcctcatgaatacgccgggcccttgcggctccctcaactctcagcagccgccacagatccattctcctctctggccccaagagcacacctgcttgcaggtttctggatagggctaaaatgaaaccgggacaggtgtcaggtgaagggccgaggtctaggcctaaggggtgctgctttgcccagaaaggcccagatgagccagccttgatttgcagcacttagaagagcccctgtggcttttggcaactcaggacaataggtgaactcccaggaaagtcactctccttccaggcccagcccaaatgctacctcctccagaaggctttgctgcccccagcactggtgcgatgtacccctgcttggtgggagtcctctcctctgggtctccagtcacttctcagtggcctccctctcagcttgttcatctgtcgttgcataggaccgtgtgcgtcaacaccaggacaatgtttctggtcttctttgaaccttctgtgtccagcacagtgcctgactcccagcaggtactcaggaaatacttctgacaggtagaaaaggcctctctgcatctttagaaccagagaagccaaaagaaactgaaaagatgctctataagaggctcaggggttacagaaggaaaggctgtgaaggaaaaggatgcagccctggccaacaagctgagatctctggccgtcctgtcgcctttctgggcctcagggccacgaggctgctggatgcagtgggactgacccctggtgtccaccctgggacagtcagatcacatgatccgtattagataaaaaaagcaaatatacacctttgtttaagatgccacatgcctgatcaaagtaaaggctgtttactcaaccacttgttaaactcaggaatagcagacttgctcatctgaacccaagcttgcagacaggacgggagagcagaactcatgcccgagggctttccccggagcaaagtcagggctggaatgcttgccaggacagcttggaaggtggaaggaggcggcagcacctgtcctcagtgtgtgtgtgtggtttttctcacttctcttcccttacccagtctctcctctctttggaggttatttgtggggcacataggctgagtttcctgggaagtagactcttgggaaggagattagtgtgcaggagtttgctaatgagtactcctgagatcccatctatggcaaggaaggaaacaggcctgagcagaggataaagtcaggctgccatgaaatcttggccgaacgctgcagccagtcctgcagagagtcctgaagatgggatgagccttcagagctgcccagctcaagggagagagtgccgagtgtgcctctacataccctgtccccatcaatcaacactgggcatcattgcctgggacagaggtagagcttgggcaaggcagtggtcttcagccaaggcaatcctgaaaggggctggctgctgcgggctgtctgtcaggggctctcccaacagagaggagaatgagttctgaaacgaggtctatgcagcccctcccagcggccaccacatgggggttgacagtgaaggtgatcggagtggcatcagccgtggtagccagagagctgttcagcttgatggggaaagggagtaaggaacgaagaatgcaacccatgtgaattcttctaatcatgccttctctaacccccagcacattaatcttgcctggcttagaagggagtcaagtgtcaaatttaaggctattctacttttttttcttctaattctatttccataggttattggggaacaggtggtatttggttacctgagtaagttctttaatagtgatgtgtgcacccatcacccaagcagtatacactgcactcaatttgtagtcttttatcctttacccccatcccaccctttctccccgagtccccaaagtccactgtgtcatttttatgcctttgcatccttatatcttagcttccacttatgagtgagaacatacgatgttggttttccattcctgagttactttacttagaatactagtctccaatctcatccaggttcctgcaaaagccattagttcattccttttatggctgaatagtattccattgtacatatataccacagtttagtttctttatccacaagttcattgttgggcatttgtgttggttctacattttgcaattgagaattgtgctggtataaacaaacgtgtgtgcaagtatctttttcatataatgacttcttttcctctgggattgctggatgaaatggcagttctacttttagttctttaagaatctccacactattttccacagtggctgtactagtttacattcccaccagcagtgtagaagtgttccctgttcaccacatccacaccaactctattatttcttggttttttggttatggccattcttgcaggagtaaggtgatatcacattgtggttttgatttacatttccttgatcattagtgagttcagtgaggttagcatttttttcttttttatttggccagtatatattctacttgaacgacccgcattctataaactcagacatccaacccggaagcccttcttcattgatcagaaggggaggagaggcctggaggggggaaaggaatggctcccggccatgcagcatatggagccaggagtagagccactgatgctgtctcccagtctagggttgagccaagagcacctttttggcctatgccttgcaggtgaccatctttctctcccatcaacactgcaccgtagacccaaccttgtgaaatttttgcactttcacaaaacccagttcaaatcaatgaggctttctgagttcttattaactgctcagtagtgtcctcaggctacaaggaggcaagaaagagaggagtcaaggtgctgcctttggtccaggaaacaataaccatggccagaaagcaaccaggagtggtggctcacgcctgtaatcccagcactttgggaagcctaggagggtggatcacttgaggtcaggagttcgagaccagcctggctaacatgatgaaaccccatctctactaaaaatacaagaaattagtcaggtggggtggtgcgtgcctgtaatccccactactcgggaggctgaggcaggaggattgcttgaacccaggaggtagaggttgcaatgagctgagatcgcaccactgcactccagcctgggcaacagagtgagagttggtccaaagcaaaacaaaacaaaacaaacaaaaggcatggccagagagtaaagggagagcacagccaggcaggccggaagcaaacaccctgcgagcatattccgacccaaggggcaggtgtgcactgctcagggtgggccaggagagaggctgtggaggagccttgggaatgactttctgtcctggcagtagtgtaaggatgtcaagaaagatgtatgggaggacaaaggcattgcctagggtgggtggtccaggcagggcacccctgcacctcttagcagaacttgaggtgagccaggaagtcacattgcagaaggacagaattgtgtctgatggtcactgtggcaggcccctgtcctacctgggaaaaggccactctctttggagttcagtcaatgagtggtcacactggagaacagcaatccttgatgctctggtggcatccagagttctgcagaggacctgccatggtcgggggttgtgattcataaggaggccactcgctgcaggcaggccaaggctgcagaaggagacatcagggaaacagagggaagacacagaagcggggacatggtaatatccacatggtaaatatcacagcagatatagccctgcaggaattaaagccaccagagattagagtcaacggcagcaaaggagaattttggcggcctcgctgggacattgggccatcccaggcttttccatgaaggtggggacatctggtgtttttatggtgagggccacccaagccaggcaagtgtctttcccaggctgctgcagagtggggcagcattgggtgctcataggcatggggttggccagcagcagcccaggggtcattgtactttgcaacattgcacttgcactcccaaaaagctgcattcctggagctccttcccagttgttttggaaaaggtcagagcaacaactgcatttctagtaccacatcagcaatcaaactccatgcctggattggccttgttgaggggatgatgtttctaagtggttgaatggtggaatacgagcccatgaatgcaggggtgacagggactattgctgggtccctaggctctcattctaccaacatgtgccctatgtaatagtcattagtgccagcaacaagtattcctgaagaaaggcaagcattaatagctagctttgtcaatgaaatgggacagatgttacctgtgtttctcccagggtggacacctttggaagagtgcctgatttgcaatctgccctgcttcatgttatggggaccaacaacattccaggaggcagattgtctgtcaatctgagatttctgatgaaaccgcaaagaacagatttccaacaccatccaaccctgccaagatggagaaattgttctaagctcatgaattcgtaaagttgtttgttactgcagcacaacttctcctatcctgactaatacagcacatctctgcttaaactcttcaatggttttcctggaaactatggtataatcccaaatccccatcacagcctataaggctttatttttctgcctctcttccaacttcatcttccactggtcctgcctttctcactcggtttcagccacagtgaactttctgtttctcaaatacgccatgcttattctggtcccagagtcctggcacttgctgttatctctgcctgggataatcttcctgaccctcagctctgactggattcagatcctcttagattccaccgccttgagcaggcatttatttcccttaccactctgtctaaagtagcccagtcactgtctatcatagtaacctcttttaaattttcttttgagcattcattacgctctgcagttacttaggattgtaagtaaaatgcttctcttttcccctggaatgtgagacaggaatcttgtctcttgacagcacctagaataaggcctggtatgcaatgagagttcagtgaacatttcatgagtgaatgaatggatgtgttatccgtggaattcattgactcatggacaacacacaaaggagagactagatgaatggttccatttttacaaacagacaactcaatgcgtcccagaaatccagcactgctggccctacctagttcctggcagggaactcagctctgatttggagcactgaccatttcctcccagattcgggcacaagattcactgtgataaatggcctgagctcctcgttgcatttaatggaaaaccctgatccaagtggaactgcagccaggtggcccgtgggagccctgggatatgacttccagggagaccacaaaacctggataggcggacgccgttccagatacattaactcataatccccaggaagcgcgcacttccgatgaaggaagaggaggcttcccctctcacaaacactaatagccatggttaatcctcatcccaggaaaaggttcttgcccaagtgtctggagaagcttcatcaacgtcagcacagggacccgatgcagggacagataatggttccagaaggcgtctgctcagcggccttcttggattatggattgtgtggggccgttgctggggtggtccctgagcagcagggagactggtgcagccccaagcagctgcccggctgagctcacctgcttgttcttggtgtccagaggcggctgtggctgttcctggaatttcggatgtgtgcttttatgctcagtagggatgcgggagcctgtgtctgggctcctaaagtgaaaagggcagggctccagtgattttgaatcaagttggaagtccgagatgcccatagagccaaccaggctgcctcagccctccaaatgcaccttgcctgagctcctcctgctgccctgcgaccccgacactcaccccttcccctttgtctcctgttctttttcttctagacttggctgagaacatcctccaggtcttaaaacccagcctcctgatttttgtttctctcccctaggctgcgtggtgctggggggatcctgtgtcctcccaaatttcccatcttccctctcatgactactgccaaactccaccctcggtcttttccccaccagtttcttcttgcgagccagaacagaggctctcaaacagcaattcacacacctgtgtcatttgtgttaaacgaaataaaaagaaaggccaagaagtaagtatttttaaaaaaatattttttgaaacaggtttttttttctttctttcttttttgagacaggattttgctctgtcatccagggtgggatacagtggtgcaatcatagttcactgaaacctcaatctcctgggctcaagcaacccgcccacctcagcctcccgagtagctgagactataggcacatgccaccgcacccagctaattttttttcttttttttttttttttgttttgtagatacggggttttgccatgttgcccaggccagtcttgaatgcctgtcctcaagcaatctgcccacctcagtctcccgaagtgctgggattataggcgtgagccaccatgcccagccttccaaggagtaagtttttcataaaaagctaaatgtattttctttaaaggattatctgttatttggggaggattttcattttgagacaacatagagatggcagctatttatgctcacatttttatcatgtggactgcacctggtatcccgaagcctgagcacatccaggacatgggacatttctacctgcccgtcctgttgctacctggagtgtgttaggctgagacctcatcatccacctttctgggtcctgtgtctcacagggaggtctctgggctcgtctgtcctctaacctcttgacccagggatctcctgcaggaaccatcatgagctcacccctcattcagtggatcacattcattcgttctttttcctctacttctttgggctcctcctccatctctccatgccactgccactcctgaaattcagagacctgtcatctcctgctcacattgcagcatagcctccaactattcccgagccagtgcgttttcagctcaccctcatccgccaagcaaaggccagtgtgcccatctagtttaaacacggctttagtctagaagtcacacactggaggccttggggctgtgcccaataagaagacatagtagctacccagggatggtttcttcttcttctctttttctttttggtcaacatgtgtatatctaaatatcagaaggccctggcaaggctgggtttgcattctcgcatgtcagtaattacctggggctaagcttcccctttgaggcagctggccctctccagtttgcccagatcccgccactgcatgttgtctctcacatggtccactccattcatgaaggtcacctacccatcatctgaaggccctggtggctgcaacccctacgtggtttccatcacccttctttccaagaaaagtaagcccatagattctgcgcagaactgaaagaaaactattaagttaggaggctgccgttaagttccttccatggtttggtgagccagcaatagctctctaccttgacttccctttctgtgaaatggggatgcaatcaatcttcacgtctggagtacaaagagatgccatgaagaagcacatttactttgaatgctctgatctcgttggagagcaggtaacataaaaatccaaggtgttattattagatagtaagaaattttgttccatgctaattaaactcacaccttaccacttccacacggggaagaggcagcatgacagcctgacatgttaggagcgggaagagttctgcatgcgagcacaagacaggctgcctcctcctcgccgcgcctggccgtgatgtgtgtgtaaatctgccttccagctccttcctctcatccaaccgggactccgacatttgcagagaggctgatggagctctcagctctgcacagagcattgactgttctccgcgcgtgttaagaagttgtcaggctggggtcaggcaggtgaagatttagtgaagcagccaacaaagtttccccgccattgggttgccaccacttatggaaacgcctgcagaacgcaagcgagaaaacagatatttctcctgcgatgactttagcactcctttggggatggggacattaagtcttcctccaccgccaggaggctgctgacagggctgcctcccgaagacttggtagggggcgccttgaaggagagtgggcgccagctctatcgatccgattgccctattgcaagggacaattgcaggagaaaacagcgggttttttttctcctccttattccagggccaaagaaaagactatccatggaaggtaatgtagctgtcaccaaggagagagaagcggaaattcacggttctcttgtgaggcaaagacatctgtgttattgcaccctaagccaatagtttttaaaacaaagtcataaaacaagctactgtatataaaagaggtggaagctatgcagggctctcccctactctgtgcagggatttgaaaagaagcaaaccttaaaagaaaaaaagcagaatgaggatgactgactacagaaagcctgagggatgtgggtggagctaagaggtggtggggtggcttccctccaacaggaaggatgcctgcttgcactcaggagggagggtttgggggcacatgaagagtgaggagctggacagaggtgacacccaggcctccttcagctccagcccaggagagggtcagggcatatgcagtcccagagctctgtcactgtcatgcacacactcacctgtgctgagcacccatgggcatactcagcttccacaaacatctacccatctgatttccaaaaccacctgggagacaggccagatggaattaccgtcctcattttttttttttttcagatgaaagaacagcaacttggagagatcctcctagttggccaaagccatggtacaggtcttctgacctaaaatccagtgccctattttttttttttaataaaaccttctttcttcttctctgtcaaggtaggtccatcagcctgagtctaaaacccacttaactccagtggatggtgacatgcactaggctgttcttgccaatcctatagaaagccatgtgtttggccctcatggccattgtagatcaccgggacctgctagaatcctactacagcctgttggcagactgtttcttggatggctggactggaaagacttcaccaaatgggccaattatctaaatggtgagttgctgttctatttatttctaagggatacagtttgggccctagaattacagaattcagaatgggagggggccttcattcaacttcccatcagcataagaatcttctcccaaagttcttgactggtgatgctctggtcttcctgcactacagggggcatggagcctgtcctatgcacagacctggtgaagggcaccagccacccttttgtaccagatattcccaccgtgtgtcctggccacgcccttcattgcactgggatgatgcccacatgtaccaatccctatactggccagtgacctctgaccctgcagcaaaagataagctgaaccactgtccttccaggaatgggagctaagatcagtgtcagagggcaggggacttccaggttgtgggtcagtttcaggtagacagagccacactggcaagccaacaaccaatgagagctggggttttgaggaatggaaactgtgagaaggaaacaaggctagtgggatgcagggaaggatgcagtagacccatgccatgtggctggcctatgctagcattgatcatccaggtcaccaccggggtctgaccctagctcaagtcagtatgaacaggggcagacctgcggtatacggctgcacaagctgtgcactgcacaaattatgacctcttctggttggcaacattatgggagcctttgcctggcttccagaacccaggctagaggtcacacactggagggttgggtttgagctcagctctgcctctgactgggtggcttcaatggaaccctgcctctctcagggctcagtgctggctgcctgtgaaatagaatagcaatgccagtcccacctgcctcaatgtgctcaggagatgagaagattgtgatgagaaggggcttttaacataaaagccccatgcaaatataaaagttatcgttctttaaaaaatgttctgtgatgtgaagagtggacgtggattcatcagtggaaacaggaaatgggtggatgagtcagctgggcccgggtggacatagttcataagggaaacacttgctctccggcattgggaaaaagagtgtggatggctctcagcagccagtgccctcctcctccaagtgcagcaagtgtggccacagctcataggtgccccttctcgggataaccacctctgccatggaagctgccatgcctgggaagctgtgttcctgtcaccccctcctagggcagccacagccacttaccggctgagatgaaaggccaggcccttcccgccagttgcaggctgtgctccagaaccctctcccagtggagccaaagtgaggctttccctgagaccgtgtcctgatggggtgtttctcaagccctatcctgcaccctctatctctttttttatttttattttttagaggcaaggtctcgttctgttgcccaggctggaatgcagtagcaggatcatagctcactgcagccttgaactcctgggctcaagtgatcctcctgcttcagtttcccaaagtgctgggactacaggtgcataccacctgtagtgcctgactctccctccatctcttaataggccttgcacaaagatactccttcagagctcatctcataaaaatccctggggcaggccctacttcaccagagcccaacgtacagcggcagctggcagagaagtgagtgcgggagcacttgattgaatcttcatgtagccaggccctccacatgcctgagccactgtactggggcatagggtaggggagcctggaagcaaactctgcatcctagattcacatgcagacatgtccttaagaggggtccctgaatccaaatgtccatcaatgatagactggataaagaaaatgtggcacatatacaccatggaatactatgcagccttaaaaaagaatgagttcatgtcctttgcagggacatggatgaagctggaaaccatcatcctcagcaaactaatacaggaacagaaaactaaacaccgcatgttctcactcataagtgggagctgaacaatgagaacacatggacacaggcatggggggcctgacagggggaaagaggagggagagcattagcacaaatacctaatgcatgcggagcttaaaacctagatgacaggttgacaggtgcagcaaaccgtggcacatgtatacctatgtaacaaacctgcactttcagcacatgtatcccaaaacttaaagtaaaattaaaaaaagaaaaaagagggaaggaggaaagtactgagcagagggagaaggtgaaccgggatgcaggcacacgtgaggccttggccagtcccacaggcagctctgaactgaatgtctatgtcctctgcaaattatatgttgaaatcctaacccccaatgtgacggtatcaggagctggggcctttgggagggagtaggtcatgagggtggagtcctcgtgagtgggattagcgcccttataagaggccccatggccaggcacgatggctcatgcctgtactcccagtactttgggaggctgaggaaggaagatgacttgagctgaagagtctgagaccagcccaggcaacatagcaaggccttgtctccactaaaaataaaaatatcagctggacatggtggtgaatgcctgtagtcccaactactcaggaggctgagttgggagaatctcctgagcaggggagatggaggctgcagtgagctatgatggtgccactgcactccaacctgggtgacagagcaagatcctgtctcaaaagaataaataaaatacaataagatacataaataaaagaggcgtgggagagctccctcatcccttctgccatgagaggattcggagaagatggtggtctacagaccaggaaaactgttctcactagacacggaatctgtaagaaccttggtgttggacttcccagacttcagaactgtgagaaataaatttctgttgtttatcatccactcagtttaaactatttttttaacagcagctaaaatgaactaagacctttggaagggccccatctttgcatcctgtctcaaccagtaattgggtgtaggctgcccccagggcatggtatgaccttggggagccagctttctctagcagaggtcaattcttagaaggaattcggctgaaagctgtcagggaccagccttctcgggagccagagaatgcatctcttgttcctaaaggggtcatctgcatggtgtagctactatgtccttccatcatggggcaagcagagctttccctcagagtcaacttatctcaagcataaaggattcggtttttccaacggaatttccaaatcattgctgggtacctagtgctgtacaagtgaatccctcaggtacgttgcatctgcctgtgaagagaccgctatgtgggaggagaggcaggcaaggcacggcttataccttggccacagtgactgcatgtccgcccaggccattcctccccactccgtccccaagctccgtggacctacctgcctttataggttgtgaacccagaaaatctgagataggtctcggttaatttagaaagcttatttggccaaggttgaggacgtgcccgtgacagagcctcaggaagtcctgatgaaatgttgcccaaggtggtcagggcacagcttggttttatacattttagggagacatgtggttcggtctggaaaggtgggacaacttgaagcaaaggcaggaagactggaagtggggagcgagcttccaggtcacaggtgagacacaaacccttacattcttttgagtttctgattagactctccaaaggaagcaaatcagatatgcatctatcccacagagcagaggggtgactttgaatagaatgagaggcaggtttgccccaagcagtttccagcttgagttttccttagcgattttgggggcccaggatattttcctttttcaaggtgctgaagggatcccaagaagcgagggactgattttttttttttctcagccccattgcaatggaattttttcattgttttcctcatgttctacctgcaggagtgtaccctgcaccgcttcatgcaggacattctgaagagtgtgagaagcaaaaaaagaatctttgcaatgtatattagtaacatttaattagccttggattacttattaagtgacaattatccctattatgcctgtcacagatgagcgactacatactgtctatggtttatgggcctaaagttctccacggagtgtcacaaattcccattatgtccccagcgctgggctttgcatttggaatgtgagcagaggtgaatcgtcccctttgcacagccagatgtatccctgttgacttggcaatgaggcagggtcgggccagccttccttctggtaaatgcagaaaactcattagcagacacactgttgatggggtgccctggctggcggaaggggattgagccattgaaactggacaggtctcctccccaggcatcatcctaaattctagtctcacagatgtcacactggagggcctctggagatcatatcttcaaacctttgaatttgtcgctgggaaatcagagttgcagagagcatgtacggtgtgtctctggaccacagctgcatccctgaacattcccactatgccagaggcatgccctagacacagaatcctggacacctcgctacagaaaggtcctttttagccaaatgtccaaatgtcccataagccacattccctctctgtgacctctttctgacaactccctttccatagaagctggagatctcaggaatatgtagacagctaatgacctcccccatcatcaccaccccaaaagtcactgtgatacatggagagatgggcgccatattcctcaagttctatggtgcatgaaatcctgcctttagactttttatgtggaatatgtcatactcttttttttaatattttttattatactttaagttcagggtacatgtgcatgacgtgcaggtttgttaaatgctcatgatcactggccatcagagaaatgcaaatcaaaaccacagtgaaatatcatctcacaccagttagaatggcgatcattaaaaagtcaggaaacaacaggtgctggagaggatgtggagaaataggaacacttgtacactgttggtgggactgtaaactagtttaactattgtggaagacagtgtggtgattcctcagggatctagaactagaaataccatttgacccagccatcccattactgcgtatatactcaaaggaatataaatcatgctgctataaagatacatgcacacgtatgtttattgagccactactcgcaatagcaaagacttggaaccaacccaaatgtccaacaatgatagactggattaagaaaatgtggcacatatacaccatggaatactatgcagccataaaaaatgatgagttcatgtcctttgtagggacatggaatatgccatactctttaaagaatgtatactgtctccaacacaagccatcaactctttggcataaacgagctttcgaatttcctctgtaaagtgcattttaaaacaccaaggtctaagaaaagtcagacatggggccaggtattgtggctcatgcctgtaatccatcactttgggaggcagaagcgagtgtatcgcttgagctcaggagttagagaccagcctaggcaacatggcgaaaccccatctctactaaaaatacaaaaattagccaggcacggtggtgcatgcctgtagtccagctacttggcgggccaaagtgggaagatcgcttgagtcccagaggcagaggttgcagcagtgagcctggattatctttctcggatctgtgagccaagatcacacgactacactccagccagggcaacagagcaagaccctgccttcaaaaaaaaaaaaaaaaaaagccagacttggagaggggacccaaaggtaaatcagggacagtcccaccctgggggagaaactgaccaagatggggagtttcttgcaggcttcccaaggagtgaaggaggtgggcaaaacaaggatggagaatgagcagccttagaggccacatgcccctggcgggaggtgggggagaaaaatataagctggggaagcatcctggtagtgtcttaccatctgaccattttacacaactgaaactcagagcttttgtacaagggcagccaaaacagatttgcaagttaaatgtaaacaaaaccacaaaactattacatttaaatagaaagtattacaaaacaatggaatttaaatcagcaatattaattcagcacaacggatttgtcctgttctgacgtaaaaggctgttcacagtatgtgagtggcaatcagggccacccagtgcactgtgtcctgtttggccagccccccttggcatgggctatggtctgattccctcacttaccacagtgaagccttcacacatccagccactgtgtgccaggcggcctatccttggacagaacacatcacctattcatagcaagtctctctcggcaattctcattagtctgcaacaactgggactgcactactttgccaaactgatcaaaccataaaatcaaacaccagctctgacatcacatggtggcattcaggctgggcttccataatccttgtaaacataacattatacaattcacaaatagtaagagcttatgatctaccagttaaaagctgagacatagagatcaggctgaaactctctttcatcactgccatgaacttcatcccatctaagtacaaccttgtccaaagcagaggcagatgttgcaggattttcgggatggagtctaaggcccagaggcctggggtggagtcatcattctaccgctttgtgctgtgtggtcttggcgagtcatcattctgccgctttgtgctgtgtgatcttggacaagtgacttcacctctctgtgcttcaactcctcattctgtaaaataaaactcagatggtaactgcccccataaaatcgctgcgagcatcataggcatgttaatgtatgtgaaatatttagaacagtggctggcactatgttagcacatgtaatgtaaataagcattactctcaggttgatgtggctctttctagatcatttgtacacatttactaatgtgcaaatatattcagtatgttttgatgttttaaaaaatatttaaagatgcaatcatacttcctgaatcattctgcaactagcctttgctctaaataatccatgagcttcaatatttcctccccaacacatcactacacacgtgccaagcagatctgaaagagcatttgaatgggtgcggcagtccacacctgtaatatcagcactttgagaggctaagctgggaggactgcttaagtccaggagtttgagtccagcctgggtaacatagtgagactctgtctctaccaaaagatacaaaaattagctgggcgtagtggcacgtgcctgcaatctcagcactttgggaggctgaggcagggggattgcttaagaccaggagttcaagactagtgtggcaacatagcaagaccctttctctataaaaaaataaaaaataaaattatccgaccctgatagtgtgcacatgtggtcctatctgctaaggaggcagaggcagtaggattgcttgagcccaggagttcaaggcttcagtgagccatgattacaccactgcactccagcccgggtgatagaatgagatcctgtctgtaatccgaccaaccaaccaaaccaacaaacaaaagcaaacatatagagctgagactaagggtggtgctggctcatcctccgcctgctccactggtcctctctggcctagcctttcagagcacagcactgcagtagctctctctgctgattctgccgtgctggggcctccaagtgccttttacagcacattaggaatctggcaccataagcactgaactttcctaaactgaagttcattttaaatgcactaaggcaaagaacaattcagaggaaacttagcccatctgtgtgtgtgcgtgtgtgtgcacgcatgtgtgcatgcatgcaagtatgcaaagagtcccctgggaattgctctagctcatgtattagggcacatgtggactgtgtattgtgagagcagagctacctacaatggcagccactgtatttttcaatattaaaaaccactcctggttactggcaaacagccaccttctctgctgtggaaagcctcatgccctgggctcctcaccttacctaatgacaagatatgcacataggcaacatgtttggaggatggcaggggctgaagggattatggctagagcaccgggccagcagcccacctctcctccacagaagacagagcagaaagcatggcggcaggcatttaactctgcacttagccgctgctcattaacgagctctctggtggaagtctttgcagctactctctggcactggaggttttgtcatcccacccacgacaacctctgttagtcaataataacagcttatttaaaaatagcagcatcaactgtttgcactgttattatctgtgcctggcttctagccccagaagacttgggaaaggtgtgcgacctgcttttccggagcttctcttgctgaacctgtttccagatctggggaaaagacaggcacatctttagcaaacactcacaatgtaattgccaggcagttatgggctgcgacagtaaaatacagcagttggcggcacggtaggttcattagtcaataaagcattgccacgcgttttattgaattgtaaccctattttgccctgatgcggaccttgtggagcctctaccttcacataaatctgagtgattcatttagcattcaaagtcgagtaaaaggaggatttggtccaattccaatgcaaccctgctccattagctatctctattattatctgcctttgcctcctccgtcagtggggacattttgataaaagcttacatcggaaataaatcagggagtgaatggcaggacatgaacaaaatagctttcctataggccactctgtccctggaatgcccaggaatggctcagggctggtaaggagaccgagtggacgattcccctggcatccctgcatccagccatccaacccactcaagacgccgctggtaaatgtatactacgctcctatttttctaatatctgacttgaaatacatttgacatggtctacttaatgttagatagctgaaaaatattttattatttacattgtttatttcaggacagagatttagctctatcactaaaatgtccacccccaaagtgagcaggattctaaaactagaaaataataacagggcacaagtcaatgttattcattccatatctgtgagaagtaccccaaataatttgctaattttaaaaaatcatatctgtttgcaagcaatattctcatatggttgggggatctgggataatcagagcaagaaggtggacttacaaattgtagggagtggaaaatagaaaaaagatttataaaataatatgaaaatatgggtgctgatgagaaacacaatttttacttttagaaaatggtatttttaaagtgtaagaaatgcaaaattgattactgagatctaggatcaacgaccagctatttttttaaaaaactggccaaaaaaataggaggaaaatactaaaaattaaggcaaattcaaaagagaataagatagaagacaggaatttcaatgacccaacatcaagtccatactctgacctgcctgccccactagaaggaaaatgagcatatctttttacccatgccttgtctgagaaccccaaagtgtccagttatttctgagacttgaagacagtgccccataatcccatggtggggtgctgcttggctttttaattatgttaattacatgtttgcttccttggagtttgaggccagtggtcccgttcagcattgcaccttatacagaaccagtaacagcagcatcgggggaggaagcatcagttaagggaaccacaggtgtgctatttgtttccgatggccttcctcgtctcctgatagctgacagttcagcaaagggaattagtagcacttgtgggcaaagaaccgaagagactctttttccctattcgatgagtgccatatgaaaggttgtttccgtagcagctcagagccctccttgctgtctcctaaagagaagcctgccaagtcggggctgtgggttttaagaggtacaaacaaaggtggcatggtagggcagaccagaggtgcggggactcaatgcagacttccccatggtttcagggtgtcaatttccaaaatgtggtccctgctctccttcccgccagactctgagaagcaaaccttgctggcaggaaacctagccaggagtggctccgttccctggcctcttctttttttctgccacgtgtagccctgatgcccataactaaaaatcacgttcataatttaatttggggggatcggttgccaaatgctcattaaacaattgggtctttgaaaatgctatctttagattttttttaattgacctattattttctggctctagctgccagatcccccaccgcaaacaaggagaagcttgctacctggactttctttgatgaatagttttaattaaaaaattctgtaccataagtattttaatcttacaaacataccaaaggtatgcagtcataaatttacaaacacatttaaattaatctataaatatgctgcaaaattgacaaggcatatttaagccgaaggatgcaccatagatgtgctaataatgacaattaagaatcgtgtaaaataaatgaaaatcaatactcagaacaggttgacaaaaaggaaaaaagggaggaactaaaacaacgtgtagtttgactattaggggaaaaaattagtagctgcttgtagttttgaaatgtctactaccgtgaaggaagggctcctggtggcatttttttttctcattctcgtggatcataaaaacgcccctgctggggtgacaagacggacctatttgggttgggtggtctggaaggaggagggctctgcttcaattctctaaacaaaatatacaccttgccagttacagatctgaaaggaaaccatccaaggtaagctatgtgcctagatgctgacacatggacacattttttttgcacatggtgatctgttttctgctttttaagcactgggacaagttgtgggggtgtctgtgctccaggaggcaggagtattttgtggccaagacaggtaactacctgtgctataggcatcacgggtcatccactcacaggagcaagaggtgctcaggagcacctttgtgtctcccggcagaaagcaccaactgcaaagagacgtgagtgtgccgctcccactaattcacagagtgccttgctgtgccgaaccaggaaacacacgctaaccttcatggctacattcatattaaaagacaactttgcgtctttcaatcatgtatttccctctaattaaggcatattcactttttccccctaattaggtattctttgttgcataatgtttgctctaatctttcggaatctttctcaatatccagtcattacaggctcccctcgaattcaaccaaagcatgttattttttctgctaattacatcctcatttacagattggcgcctcctctgattggctctgcgcaccagttgctatgacttcattagtcgtgtctcctgaccctgttatttcttgtgacaggacttgctcctcgtgtcctgtggctccagatccctgggtcacttctcaccagggttgaaatagtgtcaaacacacgagggtttagggtgcgggaatcagtgctgcagttactaattactacacacagtaacggtacaaattactgctgctggctgggcctttatttcctcctcttttttttaaattaatgttttaaaggtgtcattagcaggttagtttcattttaaaaatgtgcctgattaaaaaaaaaaaaaaagcgaaatgtgtctccctgccagggctctttcacatacagaaccccaaaagctttagttttgtagggggctgccgcctagtgagcacagaacttcagctttggctcaattaccatcaatctcaaaaatattgaattttaaaatctcgaaggtggtgctaatagaattttctaacccaaggcattcacacatttaaaaaaaaagaaaacaagcgaaatttttaaaactatacaaaatttcaacacacgagcgtaaattgtatttattaaataacaagatgaagctctctaggtaaccacatttaaaaaaaaagaatgtagctcattagatgagttatgtatattaagggataattaaaatgaatgaattacatttgagtaccaatgctatctttttaacaagcagaattgggtaacaggacctgaacatttagggggtgcccaaggcagagagtgtgtgtgatcctcactttcggattctaggccatcggaatatcccagtttcctggaatcaaaggtccaggaagagtcaagcctgcagagtttaaatgcaagttagttaatatgaaaaatgctgtatctagttgtttgcaaaattacttttgttgattaaaaggctcttcagaacttccggctggtgaaagggttttaaattgtctaatgctgattgtgattgctatgcagaaaaaaggcagtgcaaagcaaaccattatatcactgaatctttgttaagcaggccttgaaagtgtctgacagcataattaatcttgtgatattaacaaagaaaccaactcaatagtattgaagatgcttattaaaaatactaaatacctttttccacttaaaaaaccttttgaaacagtgtgggaagtggcattacctttttgtttttgcagcattttcaactaaaattgatactagggtctacagcgcagcagcaaaattgtgaagtggacaacaataagaattagtttaaaaaaccataattcccagccaagaacactggctgggctcatcatcctggcagccgcaggctccgacaacaccctttgcagaaaacccactttccaaagtttaggcagaatgaatggttggtaacaaaaatctgcaaaatatgagccttctacacattgttattttcacttggggatctcaagtgaaaagaccaagtgtatacaaccatttatgtttccaaacagtttgagaggcatgggacatatgtggattattcggggttcttttttgtgaaggcagggtttgcaagccagctatttagggcttcctggaccccctggggaactgaaccatgtccatatcttgggaaaataactggggccccgacaaacctcagcactgtatctcacttattctggcaatgtgtgagtatggcaatggtgtcctgtaagctgggcgagacactgggggtatgggcacgggccttggtgagcaggggtagaggagaggattcccctttgatatggtttggctctgtgtccccatccaaatctcatcttgaattgtactctcatagttcccacgtgttgtgggagggacccggtgggagatagtttgaatcatgggggcggtttcccccatactgttcccctggtggtgagtgagtatcacgagatctgatggttttgttggggggttctgcttttgtatcttcctcatttcctcttgccaccaccacgtaaaaagtgcttttcacttcctgccatgattctggggcctccccagccatgtggaactgtggatccatttgaatctctttttcttcccagtcttggttatgtctttatcagcagcgtgaaaactgacaaatacctattggcagaatttttaccttggatggtgactaaagagagcattaatatgtgacacatttgcaattggcaattgctgtgcaaccaaactagtaaccacacaatgcaatcacctgaatgcctagagcaacagcatttatccagattacatgtctgtgggatgacctgaagatcggcaggtcttggctgggcagttccactgattttggttgggctggctcgttcctgcatctgcaagtcagctagactagcctggtggaccaggctggggcagttcagcgccatgagtctctcatgctcactgtccccagcatggccttctcatagtcatggcagaagcacaagaaagcaagtgaaaacccaggaggctgcctaaggctgagggtcctaactgggagtaaatgttacattgagtggccaggacagagttaatggaacagaaacactttgggaggaagtcacgaataggactgaaaggcatatgttaacacatttggatttatcctgcttccatcctgcacttttcttaaagaaagttttaacacctaattataactcaagtcttctgcaaagtaaaaatacgaggtaatttatttactttggtattaaggagaaaaaaattagaatgcagtatgggttttccacaatgtcagtagttaaaagagagccagttagaagagaatgggttggacaatgttttaagccttatcattttcagatgacttgatcattcaccaagcaagcacacaaacagaaaaatccaaactcaacagaaaaattcttgtaatgaacaataaagttattttatttgtcaattatctctcaataaataagggaaaattaaattcagcaaaaatgttggatagaacatcaaactacaaaattcagtggtatttctttttatcaaccataaccaattaggaaatataattctaaaatataataccgcttacaatagcaacaacatataaaggatacagaaataatacttcaataatcctgacagataacaatataagcagatcaactatcctatactaaatctatatctttaattcaatctaaatgaatattccagttgggatttgaaaaaaatagatgtttactataaaatgtacattgattttaagatcgctctaaaatttggtaaacatacaaaatagctcattaaacaataaagaaaatcaaagagggaaaaattgctgtatcaaatataaagtcatattacaaagtcaacacaatataaacagtgtggtattgtcaaagaaaaaaataaactaataaacaaataatggtgctgatctagggcaagctagactagaccactctacagagaaatataaaacaggatctctacttaatgtcacagttaaatgagctcaaaattgattaaatgtgaaaatgtgaagtgtaaatttgaaaggtaaaaatatataattattagaaaagaatacagtgtctttatgactttttaaacagaacttcaaaaataaaaacaatagaccaaaaaactttaaaagatttgatcacatgaaaattaaggctttggttcaatgaaggacaagataaagttaataagccaatgacagaatgggagatgattttgcagtattttcaactgaaaagggattaatacctagacagtaaccccaaaaggaaaataccaaataagatgttcagacaatttatttatttattttaattattgttatatatatattttttgagatggaatctcgctttgttgcccaggctggagtgcagtggcatgatctcagctcactgcaaactctgcctcccaggttcaagcaattctcctttctcagcctcccaagtagctagcactacaggcgtgagccaccacttccacctaatttttgtatttttagtagagatggggtttcaccatattggtaaggctggtcttgaactcctgacctcaggtgataccccccttctcggcctctcaaagtgttggcattacaggcatgagccaccatgcccattctgttcagacaatttataaaattatacttatttactacaaaagttaataaatataaaaagagagaccaaaaatcattaatagtcagagaaatgcaagttgaaacaaaatgatacgactttatacctaaaacatttgttaaaaaaaaaacctggactactagaaaatcccaagtgttcacagggatgagggaaggtaggacatttctgtggggcttgtggagtgctggctgtatcccatatccaccctggagggcagctgtgactgctttcagtgcacacactatctgcaactcaggttggttgcagagtatgcagtgcatgcaggaaatttcccagggagcatgttcagaattaacattcaagagagtgaaatcggtagaagttgaactgaaatgcattcaccacagaggcctcagctattccattatcttttttttttttttttaggcaaagtctcactctgtcacccaggctggagtgcagtggcgcgatctcagctcactgcaacctccacctctcaggttcaagcgattctcctgcctcagcctcccaagcagctgggactgcaggcgcacgcctgcacacccagctaatttttgtatttttagtagagacgggctttcatcatattggccaggctggtcttgaactcctgacttcatgatccacccacctcggccttccaaagtgctgggattacaggcatgagccactgcgcccagcccagctattctgttatcttacagggagatctggagctgggatggcccttcagagctgtctaccattccccaccagatacaaagaggcaagtcccaggacctagggccaggacctctctgagtcccctggagaaagactcagttgagagccattggcagcagctgaggctcccttggtcttgaactggatggcttggtggcccaaaattgtaaccaccatactctatgatccaggaattctaccacttgaaacgtctcttcaggaagctctcacagaggaccgcaagaggcacagtatggatgctggtcacaatattaattgttgggggcaggaattggaagtctgtatggggaaggtaagtaaaatgtgaaaatgtgtagtgattcaaagtaatggattatatgttcacatagcaatagggaacttatcatttatatcagttaaaatacatgcacactaacaatatatgccggtcaagaacacatacaaggctggatgtgatggctcattcctgtaatcctagcactttgggaggctgagctcggaggatcccttgagcccaggagttggagaccagcctgggcaatagagtaagaacctgtctctgcaaataataataataatagccaggtgtggtggtgtgtgcctgtagttccagctactcaggaggcagaggcaggaggattccttgagctcgggaggttgaggctgggcggcaaaacaagacctatctcaaaggaaataacacatactaaagaatagataagcattaaacacactgcaatgattgtctacagagggaagggaattgggttaaaagagaataaataaatagacaagtcaaaaccaaggaatctggctgggcatgatggctcacacctgtaatcccagcactttggaaggctgaggtgagcagatcacctgaggtcagcagttcaagaccaccctggccaacatggtgaaaccctgtccctacttaaaaaaaaaaaaaaaaaaaaaaaagttagcggcatgtggtggcttacgttgtattcccacactttgggaagctgaggtgggtggatcacttgacgtcaggagtttgagaccagcctggtcaacatggtgaaactcagtccctactgaaaatacaaaaagttgactgggtgtggtggcacatgcctggagtcccagctacttgagaggccgaggtgggaggattgtttgaatctgggaggcgaaggttgcagtgagccaacatcgtgccactgcactccagcctgggcaacagagtgaaactctgtctcaaataaataaataaataaacaaacaaacaaacaaacaaaaacaaacaaaaccatgggatcttgcatagatcaatgatgacaatgtgttctaaactgaggattacaatgaactcaaacctctgcacctgagtcccaggggaaaaaatcatagtagtgtcagaaatttctatccattatttaggttaacctcagattattccacatacctttttttttttccacacctaatctgcagtaggtctcctagagctgtggtccagctgatatatctattttttaggaaatcagggatgattttccagatgttttggatagatgttttcatatttgaatctaattaagggtttgcaaaagaccacaacaacaaaaaacttgtagaaaaaggtttacattctttcttcactctttggatttggtttgaagagaacgaatccaagcatggggtttgaaaagatgttgccgatggaagttgagcatggaggaaatcaggagttaggagaagggggaagagagcactgcattgctccagccgggtggagggtgttcctggaggaaacacaagtgaaaagtgaagttttacaatgaggaggagaaacaaagttaaagagatcctcaagtatttttaaactgtgaaactgccaaagagaatttgaggcagaatgtacacagtccacatggggaaatgttttttatagaaaaatccagtttctaggatattcttatcacagggctgggaggcagagaacagattcagaacaatggctttgtcgaactcttaaagccaagagagtccagctccttgtctgaaagtctgtactcctgaaagtaagaaaatatatacaggaagatgcattaagaggcagcccaggttccagtaccaacagtcacagccctcctctgttccttccgcaagcctcactcttttttgagcctcagcttgaccatctgtaaaaggaaaaggtcaacttttttttttctcaacttttaggaactgatgcaaaagagtgatgtaagaaagtgttgataaaatctctgccccagctgtcaggaagctacagagaaacagctgagtcccatcatgtaagcaacaaactgatggtattctttgggaggaggagtaggatgagaaggagggggaggagagagagcaagaggagggtctgggtggtggtgggagaagagaaagaagaggggaaataaaaataatattttaagtggagtggctggtgatatttgtcattctctcagtcggttatagtgtgagcatcttaccacccttgtgtgagtgtagggtttttaaataaacaaacatatacacatagattttctattatatgacctcaatgcaagtcagctacatcatctgccgctcagtggaagtagcaacaatttattccaactctggagaaaaagtagccctgttggatttattgaaaattgacatatctgtacacggacagaaaactggatgatttaaggatttttagggcaattttgatcagatgtgatttcatttttaatttacatgcattattagacatgtgctattacaattgtcccagcatcagatcacacttctttatgaggcaaagtccacctgcctttatagagatcaacattttcaaatatttttctatcttttcttgaaaagagggaatagagacatgagtctttaaatgaaaccttaatgaagcaatgaagtggggacttcaaggaatccattctgcagagtgcagtggcagcaaactgtccacaccttacttcctaaggcaccaatagcataatgagaacaccagtgataggtgtgtggtgtctgtggtgttggcagtataggccgtgtgtctggactcagttgtgtgactatggcacctctctggagttaagtggggtgtccttctcagtccaattgccatacctggctctacaagccttctggataggaaggttactcaaaatctttttagtatttttttttaaattctaaattagtctgactttatttctgatgcttggaactaagaatctattcagactttggaattcaactctcatgcaagatgcaaaaatacttctttaatgtttggtttattcaccaaggaatccatctggatttgcagttttcattgtgatgagttgtttaattactttgttgttgttgttgataataaatagggctatttaaattttgtatctattcttgtgtctttggtaatgtataacttttcatgtcttttatttcttctaagttgttgaaattatttatattaattttctcacaccattcctttattatcttttaaatgttgatagaagatcaacattaaaaaggggatgtaccctctttcattactattagtctccatctgtgtcttctcttttattttgttcagcatatctagaagtttgttgattttattaatctagtcaatcaactttggtttcattgatttttttctatagtttgtatatttatattttattaatttctgcttattatttttctacttatttggctttaattttcctgaattttctagtctcttaaggtataagcctatatcttttattttagacctgttttttctaatgttagcatttaaggatatagattttcctctaaagaattgctttagctgcatctgatgaatatatatgttgtgttttatattcactcagttcaaactgttttggattttctcttgtgacttcttttttgatccatgagattcccagaaatattttctccaaatatttggggatttttagatctctttgtttattgctaatttttattatattggaaatatatcctgtatgatttcaatccttttaaatgtatgtacactttttctaatggcttaggatgttgcttatcttggcaaatgttctatgtgccattgaaaagaaaagcattttgctgctgttgggtgaagtggtgaagtgttcaatagatgtcatgtcaattaaatcccactgattggcagttttatccaggatttctgtatccttatagattttacattccttttattaatttacattccctctattaattacaaatctgtaagaatttctgtattcctatagatttacattccttctattaattactaagagaagtgttgaaatcttcaactatattttgtatttgtctttttttcccttttaattctgccatgtttgctttaggtactttgaggatttttctggtgcatacatgtttaagtttgttatatgcacatatatattatatttatattgagatttgagcattgtgtccttatgaaatgtcttttttatctctggtaatagttattgtactggagtctactttgtctgatattaatatagtaatgccagtctcataattagtttctgcatcacatactttctcctatcgttttcttttaaaccatttatatatttatttttaaggtaagttttctgtagatatatattaatctttggtattcagaaacaaaaaatagaattccaaggaaatattgggaattccttaaattacattagtctgtatttttcataacacttttttgctaaagtacctatttgtaggtaaatttttttttcagtaacataaaagtaatctctacctgacatagacatttgagaatagaaaatattttaaaggtgaatattaacacaaaataaatgccatgcaaaaatcatttaaaattttgaaaaataataccacaaaatttaataccccaaaggtatcattaaaaaatgaaaaatacacaaagaattaattgtcttatgcactagtcttttctcttttttcatgacaaaccttacaaatgtggaaaattttcattcatttttgcattgatgttggttgaatggccaagaatgtacctgaaagcatttgtaaattaggctttagggcacatgtttcttcatatcagattatatcattttttaacaataaaaatattttgtgtgcttgccttgattttgatttttgctaatgaaactgatattctttttgcaattcaggttttagatcagtttctaatcttatttcagagtattccacaaacatgtgtttacagcctggcaacagctatgactgagactaaccgaggaggttatggttactcttctgcctgctccttccctggtttctgtaaatgtttatcttaaccttagactctgcacattagtggttcctgttcatgcttttgagttgacatcagtggattcctcaaaactactaggttggtgcaaaagtaattgcggtttttgcctttgaaagtaattaaaagaaatgtctatatttatcgttaaccttgaatttgcatccaagatttatacttttttcattttcccaatttcttgactgaaatataaaaatctcccaaaatgcagagcaggaattttcacaggaaaacattaagcatgtatttggtcttgtttcttcatcgagtctgttcatctctggcttttaattggtgtgttagactattatatttattataattattaatgtggtatttcagtatttattttctatttctcccatctgttctttgcttcttttcctaccatcttttgaatcaatcgagtattttttagtattccattttatttttaccttaggcttatcaggtatacatttttcttccatttttcagcaattgcttatggcttgccatgtgtacctttacttctttaaaggctgctttgaaatactattatgttacctcaggtttaacataagaaccttaaaatagtatcttccactttctccttcccgtcctcccatccattgtgctattgtgcccagacattttaattctgcagacactttgaactacactactatctatatctatatctttttaaagttatcctatctaaaaaaaaaaaaaaaaattgaaacctatttcatgattactcacttattagccatttctggcagtgtgtttactggagttgctgaatgcgtgaggcattcttcccttaccagtccgaaagttaaaccagttaaactctgccattttgcctcttagtgggcatgcttaagcccgcttgcccaattcttgatcttatcaagaattgacagaatcttatcaagaatcttataagatcccagttcttgagatcttatcaggaagctgctgatcaccagtttcagatgtttctgtccatcaggagactgcctttccctggcacttacccctttttataaatctgtttcaatttggtgtcatttttcctctacccaaaaagctttctttaatatttttgtagcttttacatatgacattgcttctgcttgaaaaatgctcttcccccattacctgcatggtcagttccctcaatcctttatgcattttgctcgaatgttgcagtctatgtggggtcctttaaccacctttcaatactgcaatgctctgtccccatggctctctctgtaaccccgccttactttatttttcttacaacacttaacatctgacctgtttggtagtttggtttttgtctgtctccctgtcattagaatgtaagctccatgaggatggagctttatacatacttttttccacccatgtgcctatacaccccttcctagttatgttaccaactgaatgtacccaagtcacacagcaccaaagtatgtaagcggcggcgaatccatacgggtctgcagcaacctcagttcttgtctcctcagaagaaagaatccaaacgaagagcagagtgagagaccgaggcaagtttagagaaggagtgaaagtttattaaaaacttctcccctgattcttcccttgcggtgggctgtgcccatgtacagtggcccagtagcacttgggaggggctgcatgcgtggtgcgtttactggagttgtacgcatgctcacatgaggcattcttcctttaccagtccaaatgctataccggttaaactccgccattttgcctcttagtgctcatgcttgagcccgcttgcccaactcctgagatgtcatcgggaagctgctgatcagcaattacaggtgtttctgtgtattgggagactgcctttccctgtcattgatcaattatttttttagagagatacttaacaactacctcaccatcacttgatggttgcctgacattcctgattggtgagggagagagggagggagtcaggggggctctcctgccctgttcctgtctgactagctacctgctgtaacaattatactagtactagtgataaacctatcacttgtgcctatgacagggccttacacaaggtagataaccaatgattatggttgaattaataaacaaggcctctcttatgcccctaaaaatgcagagatgctcttctcacctctcattcggaatctactctcaattatatataagacggtaagattagtcaactcactctcgtcaggtggttaacgtgctagtggttaatccaatccaattacttgttcaaataattagacccatgctggatgtgttcgttcagctcagccccaccttctctgaaactatctcagaaccagtggctttggttgggcactggaagtacataaagaagaagacatacatgctgtctcagggtgatcgtgggtctctagccaggagtcagatgacatcaccaccatcacaagctggtgatgccagagaggtatgaatggggaatagagttgaaattcatatggaagtgaccagtggagttgtcggggaagttttaaaaagaaaataacaagtaaactgggttttgacaaaaaataacatagggatttcttttctgcatgtgagtacatatctaaagtagaaaagtataaaagttaaaaaaaatacacaattacttggttcaggttaatgcccacagcccagaagaaggctcagagccttctctgtgagtgtaaagtttatccaagccaccttggacaccatcacattctctgcttaagcaaagctgcttgtcagaggagtttctgcatattctgaatattcagggactctcctggccctacaggtggctcaggaaaccctagagaggaaacgcatcctcattggtgaaaggatctcacctggcttttgccgagggtgagcagtgtagagggagcataataaactctcatagacaacatctgatttccgacagctgtcccacttctgaggcttcgtgctctcagcgccgccaccgccaatgcaatatcctccagtttaaggttaggtaccagaaatatttctgccagaagttcttgatgtaatcaaaacgggattttcatggacttgcgtaattttaggatctgggtgaagaagccttacccagccccgctttgagtctggccctcagtctgtcacatagtgaaacagctcgacatctgactttgaagccaggttcttgggtcagttcctacctttgtgtatgtaccaaagaactccttcaaacacttcctttccccacccatctgtccccacagacatgtaccccaatgcccttaacttgttcctaaatgagtaaacaaagcttcggtaacatataaacatgatttatgaaaacaaatctctccccaaatctgcttagagaagcagtgtcacataactgtaagcaaagatgaaagaccacgattaacagggtccacatctgttcgggggaggatgcagcttgagtctctgccagcctctacctcaaagaatgtgtgcgctaggtcaataatgaaactcgtggcccatctgtccttccggtgtgccctgcactgtgctaagaacttcccatccactggatctcacggaggttcacagtcatctgaagagggggtcctgtgttcacctgcatcttgcaggtgagtggacagaagtgcggaaagcatgagagctagtgcagagaagagctggggcaccagcagtaggactggaggcaggacattgtctttggttactacctggatggacaaactacatagatgaagattaaaaaaacaaacaaacaaacctgggcctgatttatcaaattgggatgtctccattgatccagttgcttgcatcatgtgttaattctcttctgttctctttctcatgtaagcaccacctgtcttccacattatgatgcgaagctgaagattcaccccactaggtcaatggggacactaattggggaatatttgaggtgcagagaggaggtagatgctacatcctgtgaacctcagtaagggggatgcctctgtgtgtagggatgtcaaggccctggccccgtgtcatccccagataagccccatatcaccctgggagctctgcaaggacagaatccatgtgacattttgggaacttctaagatgctaatcagaggccttctcctctgagttctcaaacaaatgagaagtagacccaagggtcaagggttgatgaaaatagcatggttgtttgcagagctggattggatctgcagagagcccaagcctccctgtcttcctctgtctagtctccggccactgacagagtccaggcagagacagaaccaggccgtagacttgctgtggggaaggatatctgtcacatggaagcagaagccaacagcatctttcccctgtggtccctaaaggaaaaattgaggcagaccacagggaatagcaactctttcgtagcttaagacacccatggacatcttctcatccttcccagcagctgtccttcaggaaagagggaatggagtgggaattttccccccaatactttcagggaagaagtcatcatttgctactctctgaatgtttgtgctttttccccaaattcctatgttgaagttcacccctaaggtgacggccttaggaggtggggcctttggaaggtgattaagtcatggagatggagtcctaatgcacaggattggtggttttataaaagaggcccaagagagatctcttttcttttccaccatgtgagaacacagcaagcagtcaccgtctatgaactagaaagctgattcaccagacaccgaatctgccagcaccttggtcttggacttcccagcctccagaactgtaagaaataaatacctgtcatttgtgggccacccagtctatagtatttggttatagcagccttaatggaccaaaataccattcctgtgcccatcagcagcatgaagaataggaaatgatatcttcccactgtaggtgtcactgttgacctccatcacaccttcttgcatccacacccttgctgtggcctcatcacaggttgcatatgcttccttaactctgagctctgaggttggctatgtgatttacttttagccaatggaatgtagatggagacaggagggtgccaattttgagatgaggcatttagaagcccttgatttcagtagaccctcttgtgcctctggtatcaccatggggagaacatgccccagttacctctctgatccaaaaagtgcgagagacaggtggaaagagacattgtagacaccctagcaatcccagatggagagctgcttagtcaagcccattctagatcatccaagccccagccaactcatagacacctgggtggtaatgcaggattgctgcttaagtccacaagttttgggctgtctgttatgcagcaacagcaaactcataacacttacctttcatatttattttggaaccccccagacctagcaaaactcccagaatagtgtaggtgcccaaaaagtattcgttgtttgaatgaattaattaaatctcctttttgtaaaccaactcatcataatgtctcactaacagctggtatacattgcagtatttatctatgtgattttggaggaataatttaaaaaaacaataccaaggcaagacagtaacctctcttgatacgagctgctaagcatttaaagtcctaggagtcagagatcacctggctatcttcaacatcacctgcaggcagctggtgcatcacacgccatggtgtgatgaagccatcctccttcacccctgtctaaactctgatggggagaaatgagccaacatggccatgcatttatctggagtcaatgctgattctaactccatggccacctttaccctcaggtatgtgagtcccatcagagaggttgccagtatgacatcagatccacttttcctcttatttttcagaggaaatgttccaacacatctgaggaaacacatgccttcccagactggcctgttgctgtttcccaggagctgcattctggaaggtggaccatcaggtggaagaagtattcttcagagagctgccttcccaagggaatggtgacagcttgcgcttgccggggagtcctgctgccttccgaggtgtgaagggaaggcatgcactgtgcatatgctgtaccatacagttttgcctacaactgcttgtagcttcattgtagctgtgaatgctccgttcctctccttttcacccctgaagattcgcgaacatgcaggattgagctgtgcgaggcatagcattccccacatggtagacgaaggcggatgtgggtctgatggctctactgccgtccacccgggaggatggacgtgtgttccgggatatcagagcttgcggctgaccagcccacatgtccatgcagccctcccgctggctgtgtcgacattttgggtgtcactgaaggattttactggtgcagactttacaaaggcaaaattgtttctcaaggaagtggacatgaaagatctaaaatcagggctgcttaaaaaaagcaagcacagattaatgacctatctacatcctacacggttttaggactgcgcctagatgggcttaaagaccctagcctaaaaactgtaaatgtgcttccgtctttgccctgtaggacaagaaagccttacgggcttgcttctaactgtgagaggaggagaggccaggaagggagagggagaaaaggaggagaacaggagacgagaaggaggggagagtgaggagaggaggagagaggcttgtcaaaatctttttagtgcacaaaactaattttgttcatcttggatttggtgagctgggtaatattctgtgcacggctcctaaatgaattattaaatgtcaactcaagatggcttaactaaaatactcaatttaataaccaaaagtatctaaggtaacaacaacaattttgcaggtgattgtagagttgtcaagtcaaaccattatagacaagcatttggggttttcacataatctccttccacatctcatcttctgtcactaaatacccactctggtgagcatattccatttcaataaagatcatcgcttcggtgccagcttctttttattcagatcgagccagaaaaccttttttttttttctaaaatataaagcaaaacaagatctcagtcacaaccaccaaatctttattaatgcattccttgtgctacttctgaatattaataaaaattaataattaattttgcctttggcattgcaagatatactagttttaattagtgtactgtactcctatacaattaaaaaataattgatgtccatgcttattggcggtgtctgtgatcttcctttctgttgttgtcaacaaatgccttaaaaaacaagtttcaagaatgttgtgctgcccacttgatttacacacccaaagtaacaggcaaatcttttatgatgaaacagaacagttttctgtttaaattatacacaagtatattaactagaaagagaaaattaaaagctgatgtctacaaggaataatggaaagtctataaaaatgttttatctatcaacaaatttgcctggaaaatatcaatgattggcaccatctctccgctgaaacatggggaggccatcttggatgtgttatgtcaattccatcaagcatttaattctgacgtcctccttaatcagcttcagttatttaaattcagcatatcatgttactgttctactacatcattttaattgtgccatgaactactttattatagaatgctaaagtatttccctgtgcctccttcttcctctgaacaatgccagctgtagagagacagcccatggtgaaaggagggaaattgctttctttgaaaatatttgtgtcaagaatcttgcatagagagagggtggtggttgttttagcaagaaataattcaaatcccacagcacatatttcttagttttctttctttgaaccaggatttttattttttatgaaatctccattgaacaactacaaatgtatctgtaataccaagaggtaataggctaagaggaaagagacttaggaaaacacatggcaaggaagaaagagtcaatgtgagatgcagatttcacactttaccctggactcactggttaataaggatgtttacggaagaaaaatcacaaattgatgcaaatttttatcatattcatgatcttaatagcaattttattttttaaaaaatctactctaccaaagtatcagtcctaaaaacgtaatctttggtttatttttcataagagaattggcttcagagaacctatcacaatctaaaatcatcttgtccatgtgtctgtttacttgttcataatctgcatctcctcctaggtccaagtgcatgagtcccggtgcctgactgtccccttcacagctgcactcacagtgctgagcacaagctctagcagagcactgacgtttcgcaaacatccgtggaatgaatgtattaattctgactcaaaataatttttttccctccccctttctagagtcttctaaattttctttttccatgtccatcaaaatgtgaatggcttaaccagctgtggtctaactgtaaaatgtctattactcagtgataaaaaataagccacgaatacacacaataccacatatgagtctcaaaacaatgggttgagccatataagccagcttccaaggagtctacgctgtaggatctaatgcatatggagttgcagagcagggaaggctaagctatggtgagagaaatcagaacagagcatgcttgcttctggagagaatctccccaaaaagaggcatgaaggaacactccggggtcatggaaaagtcatagagcttgatcaggctgatgtttgcatgaatgttatgcatgaaactatacacctaagagctgtgcatgcatcctatgttaattatgtcttaatttttaaaatcttagtaacacattttttttctagttcattggcaatggaaggaggaaactcagaatatgaatacagttgagaggccctggaattcctgtttccatatcactacctccctccacagattcagggaacagtgctactaagcagcagggttgacagatgttctcgcaactcccctctgccctgatgcattttcctacctggtttcaccccacccctgggggctgtaacaggtctctctcatgcacaggtgatgaaagcaggggttccttcattgcaagcacgctgtcttggatgcagggaagcacccagctctctgccagaagctgtgaataacactcttaacagtccatgcaaatgctgtggtctatgtctgcatgcccagctggtctgctgatcaatttttacttctcaaattgggtcagtgaaaaaggacagcgctttctgttcctgcgatctaaattctcaatgtgatctaaattctattaacactggggaacctgaaaattccaaagcaagcctttagcctcactggggccacctttcagaaaggcccattgacctattttctttttaaactttccctttcttttaattaaaaggctcaaatttcctagatgttaatcaaagattagcttgagaattaaaatgctgtgcatcactcagaaaaagaaccaagtcgaatggtgaacaacactcctctcctaatcagtcctgaaccacctcggaaggaccttctatgcaatttcctcgtgtctgtgagaggaaccaagacaagtgggaaggcctcctgctattgtgctctggtggggagatgagctgtggatctggggcagcctttggggattctctgttgtcttcctgtaagaattggatcttctcctctgactgcacctgagaagtcctgattttctcatcctgacttttcttctcttttcctttactcatgggtaatgggtccatattcgaccaaagggtctaggcatcgcagctggccttgagcttcctggtccactgtttttgattggctcctggggtgcattggagacctgcaggtgtctgaactgccaaagtgagtcctacacctgggacaaacgctcttggtctgtccagagctgtcccttccacaaatctgtgtctcttgttgtccctcaggttcacctaggacagcctaggtcatgtctcaaggatgttgaatggtaaacaacacagaccccccgggcagtgcaggcctctgagaaccactttcattgcatgcaatgtagggacattatcaggtaagagacgagatgctgcctccagccagaggcagaggatgtcagggacagtgtgtcccgcaagagtgaaactcaggctgcatcctcaagggagggatagtttcaggtggaggaggatattctgggctccgcgggcaaaggaatattgtctgatgagagaataagagctgttttctgaagagcagttcttccctgaaattcagacattcccatgctggcttcacgtgtgttgccatttcatgtcccctctgagcacatatggcctccccaaagcttgctgcagttggggcagacaagagagacacacggaaagctgtgggcggcaacagccaccaagcacatcagggaagagcatcaggcggttccactgcacgtctcaggtctgcccactgctccgtctctgtgccccatctgtaaatggggtgtgtggggttggactcagggagttgttgtgaaggctaatgaggcccattgcaccctgtcccttgacatgttgtaaaggctgaatgcatgatagctatcattaatcgttttctaggttagaatcaaaggataagaatatttgtcttaaataaaaagccaccaaagggtgacttttaaagaacaagaaacaagcactttgggaggctgagacgggtggattacttgaggtcaggagatcgagaccaggctgagcaacatggtgaaacccggtctctaataaaaatacaaaaaaaaaattagctgggcgtggtggtgcacacctgtgatctcagttactggggaggctgaggcaggagaatcacttgaacctgggaggcggaggttgcagtgagccaagatcacgtcattacactgcagccttggcaacgagagcaaaactccatctcaataaataaataaataataataattataataaaaaataagaaacatcaaaaagtcacagaatcatataaccaggccactccagtccctgttttcttttctgtcgcccagacctgtcctcagtcagctctgccttatcccgaccgctgagtcttacctgccctctctcagagtgcagtgtcctctgctgagcccgtttcagtcaaagtcacctttaaggaagtttgtgttttaaaatggacccgagatcaatgccccaactgcaatactgtttccaccacagtgtagtttagtacatgcccctcggagacctcagctttcactgctcccccactcccatgtcaccaggggcgaggctggccttctggagtctgcagctctgtgagtccccaacagggtggggcttatttagcgatggcatcaggctgcaatgtaggctgaaacacacctaccacacactgcgtgtgcagaatgctttcacacgcattaattagtatgcgagctctcctctgccctggagatgaagggttttttttaggaatgtatctcattttgctttattaggtaataaattctttaagactggggacttggtcttatccttatgatccctcacaatacctaagtgtcccttgtgcattttagatagtcaatctgtcaatatatattttattttattgattgattgatggattgagatggagtctcactctgtcacccaggctggagtgtggtggcacaatttcggcttactgcagcctctgcctcctgggtttaagcagttctcctgcctcagcctcccaagtagccggggctacaggtgcgggctgccatgcccagctaatttttgtatttttagtagagatgggttttcaccatgttggccaggatgctcttgatctcctcacctcgtgatccgcttgcctcggcgttccaaggtgctgggattacagatgtgggccaccgcacccagccttatttattttactttatttttccataagttactggggtacaggtggtatttggttaaatgagtaagttctttaatggtgatttgtgagattctggtgcacccatcacccgagcagtatacactgcaccatatctgttgtcttttatccctcacccccttctcacttttcctcccaagtcccaaagtccactgtgtcatccttacacctttatggccttatagcttagctcccacatatcagtgagaacatatgatgtttggttttctattcctaagttacttcacttagagtattagtggaaacaaagttatctgtgtgacattttgtttcactgctcatcctcctcccctcaattagactgtaggttctgggaggtcagggattgcatgggcctcagttcttaccacatctctgaccctggcatagtgcccggcatacagctagtgatcaagaagtagtaaatggaaaaataaatagtcacattcaatagatatgaatatccagtcttctcttgagtctgaaaaccaagtggagctttcatgccccagggtgttgacacctcgctgattcctgcccttgcaagtctcccaggaaagctaaggttcccactgccctgtgtccataagttgtcttgtgtctgtctctgctatcacactggatactggaactgtctcccatactaggcccagggctgctgggggacaggggctttgtctgcatgtcacctgagccatacagtgggtgaccctagcagttatcaataaacacttgtttcaaaattacggatgggtgcggtggctcacacctgcaatcccagcactttgggaggtggaggcaggcagatcacttcaggtcaggagtttgagaccagtctggccaacatggcgaaaccccatctctactaaaaaggcaagaattagccaggcatggtggcacacacctgtaatcctcactacttgggaggctgaggcaggagattcggtagaacccaggaggtggaggttgcagtgagccaagattgcgccactacactccagcctgcgcaacagagtaagactctatctcaaaaacaaacaaacaaacaaacaaacaaacaaacaaaacaaattagtcttatcctggtcacggtggctcatgtctgtaatcccagcactttaggaggtggaggcaggaggatatcttgaggccaggagtttgagaccagcctgggcaacatagtgaaaccctgtttctaaaaaaaataaaaaataataaattagccaggtatggtgatatgagcctgtgcagctactcaggaggctgaggtgggaggatcactggatcccaggtggtcgaggctgcagtgagctaggatcaagtcgctgcactccagcctcagagacagagcaagaccttgtctccaaaacaacaaaaacagttcatctcatctttttccctacccaccctgctaacattgtggacctggaaatgggcttaaattctgatctaccatcaaggtcacaaaggacctgaatttcgtttgccagccttcctcactgctgcctttagagaaggcatccaggcatccttcattctaggggacttcacgccatcagcactgtgggaacaccctcaggaaaggggagcagaggcctcaaggggttttttctgctctgtcattcctctgctgtcagatggagctcgtttccagcctagtccactctaggcctctccttggactacacagagagacatcaagatgagagctggccccaaatggggttgaatgttgtgtgtgcttaactttttgtgtaactggccaacatgacatgtctaactatacaaatggaaattttatgatgataagatcagtagttactgagatatttatgtgacaagctgacagatataaaactacaaagcttgcttttatgcctcccatcttttcagaggaaaaatataaataccgagatgaggggtcactttgaggagaatttatgatctaaattacctaatacctggtgaacttctaatatgcatgatgaagtctgtctatggtattaaaaagataaacttcatgtcccaagactgtagcaaataaattcatcctgaagagggatccaagtatctcatcttctcctaccccaggtaaaaacccgaaaaccctgccctggaggaagggattttcaccaggttgcattgcacaagcatcttcccagcctgggtcaggatggcctcacgtggtcatcaaacattaatccattctttggagagaaatctaagtcctgaaataattgtgtgttgataaaatatagcaataaaatacaacattcccttgccactgcggagtgcacgtcaaccaagaaaaacagcagaggaagctgcgggacacgttgtgggcactgcggctgtggctgctgccagatctgtccttcagtccaggtgacaactggcaatgcaacacctcacctgcgcacctggggtcagccttctctccatgcctggctgctgccacttttcctgctctgatgggcatgggagttgccaggctgacactggtggtgtctgggataagcccttggcagctggacaacctgggctttcttgttgactcggtgccccttgttaccacttctgaggagtgcagccaagccccggtgccatgagtgtacctctgtgccaagccatgacctggcactctgcaagcctaacttcctttcacactcacaggtgctttgcaagcggaggcaccactcatcatcctcatcaccagacaataacgagagcctgggaggaaggtgagggagccctgtgctctgccctgtcggtggttgggaaggctgaatgaagcatcatgctttgagtcactaaatgtcaccttctcatgctacttactcaagattgcacagtcctgatggggctggtgtttaaaacccagtctccctatatgcacaacctcaaaccctggctgtctggggaacaggaatagattagaggtggacgagacagcaagtttctctcttgttttgtagttgctcctttacaatagtgtctcttccagggaatcatggagtgtcagagctgagtgggctcattgctagacagagacatggaactccagagaagaggggggcttctccgaggccacacagcaagatggtctgcaagggaggccgaaagcccagctcccttcaggccctagaccaactttccactctgcctcctcctgccttctttgaattttatatttcacttcgttaatgccctgcctctgcccagcgcgttgtcatggtttgattattttaggggtgtttgcagggcactaacctttcccctcagtgtgtttgtgaattcattgtgtaagcctgtgtgtgagtgtgagctgcgtatcaaacccaaattaaactcttttactgtattttatcctatcgatcttctgtgtactcctcagcaccgtctcatttaaataaaacttccatttgtaacaatcctataaatagaaagtcttattgatcagggccccaccggcaggctgcactttggttatcactgaagcctgaccggttaatgcgagggatactatttattatgcagcaagacacaaggcaaggccgtgccatttagatctctaaacagaagcgtgctcagctccagcaagaagatccaatggggctgtccttgggatcacaatttgctcttcattcgccatttcccaaccccagatgctcaacagggttggccttgttggagacatacttgccccagcctgcatgggagaagtcaattattcaccacggcaatgaagatgttagttcaggaacattacaaaagctgggttctggcctcatgtggcggctcatgcttgcaatctcagcactttgggaggccaaggtgggaggatagcttgagctcaggagtttgagaccagcatgggcaatatggtaaagcaccatttctacaaaaacatacaaaaattagccaggcatggtggtacccccctgtaatcccagctacccaggaggccaaggtaggaggatcacttgagcccaggaggaagaggttgcagtgagccaagatcgtgccaccgcactccagcctggacaacagagcaaaaccctgtcaaaaaaaaaacctgggttcttctccacttggaggtcatgctggggaaatgtgagtgggcttgtggtcaaccagaaatgttaaactaaccacattgaagtgtcaagattctcagcagtactaaatactcactatgagcaggacatggttacctaggagtggaatttctttctgttggaagctgtgctttagatcatgcagctattgctttgctgaataagccactaaccattgttgtcatcattctgctgggcctttcttagaaattgccaataacgccaaccagtgttcccaaaaggtttgcaatcaaacggcttcccccaaatccgtggaagccaggcataagtggaatgctgggctactcatggaaataaggtcacatttatgctacaagtggagaaatttggcccaaaccccttgcttgctcccaggtgccctgctccctagccaggctgaaacttcctgctggggcttgcctgtgtctgaggctccatgctgggtctgctgacggatggacctgtggatactgaacaccgtagccaacaacctgaatgctggatgtgctggaaactcacttccaccagaatgctgcagagacccatcagagaagctggtctctcattccagaccccaaagcctccaggactgctggtttcctgtgccccatctgccaatattggataggaagccacctttcaagtccacatggcacagcaggagctagagtgtaacgttccttggttttgtctttggttttgtggatctccccttgtgtccttagctgtctgtccctatttacagcaaagagaaggtgatcatgttaaggagccagtccagtgtcccctgccactgggcacttatgttttccattagatctctcctctgaacagaatgcttgacaggtatctccggacacactagggtgagggcttgtttacttgctacatggcttcagggtaactgggaaaagacctgccatcagacatgggggccctgacatgccagtatcaacaggaaacatccctgggccattggtgtcacacagtagcccaggttcacacacacacacacacaaacacacacacacacacacacagctataagcaagagtatctctttctgtgcacagtgcggtctactgctagatcagaaaaaataagcacaaggacacttctttccaaagcatcaacatggcctacagaaactaagcggtctgaacactcagcctaaaacatctgtttcctcgggtttatccaggaacaacagttagaactttcatgggtacttgttctatatcagagtaactaacacgttcattcagagaggtgtcccaggaaagagaaaatatgtatcaatgaagtaatcgcatctcctttgtaactagttgaaggcaaaaataatggtttttccagttacttctgggtctgtggaagttaaaaaatcactcggcccaagttcctgtggggacactcggcttccaaagtgatctctaaactctcatttatggtcctctctcattaggccagatgctgaacttgctcatctgttacactgcaatctgggtcttcataaggtcttttttactgttaaattttaataacttgtgttataggtaggatagaaacaatatcttagtggcatttaaaagcaaatctattaaatttgagggtaacggcattacatggctagaaacattatcatttcaatcttgcgggggaaaatggctaccatacgagcgaaggaaaattctgtactttggaaaacacaatccaagtctaatatcatttgtgagaaggaaattctttgctcattaccagggagattgtttttatcttacctagaactaaagttattaaagtttgagaactgtaaaatgcttaatgagaaactgcagaataaattagagcagccaggacctgcgctggtatttgccgatgataaacttcaaatctcgattgtgggatagtgccttggcttacccagagccccccttgtgagtgtacaatgactaaatggttaaacggagcagtaaaatattaagtaggtaaccatggaaaccatgatgctgtccagtgtggggacataccggggagcatttcctgttggattcaagggaggcgttgatattcctgccaaaagccagggcagcttgacccatcttctggacttgcttcactatcctgcccctgtatagaccctgcatgcgatgaagaggagaatgttctggcaggcacagaaagagacgcagcagcttgcacacgagacaagcaaagagaggcacaaatgactagctgcagaatattgccacctgccaggagtgtccaccgggccccccaaatcacacagctgaggaggttcaattgcagctctgggcatctacaaactgtaacaaaagtgccaatatgattagccaaggagaggctggctctttgcttctttaggggaggggaggtggaattgttcactaatctcctctgcactgggcccaaggactgttccatctggtgttagctccttgggaccgtgaactgtgtggtctacttgccactgcacatgataggttaccttctactaaaatgtcccttgtcctcccggagtcccactttaaagcacctcctgaacactgctgtagatcactggttagaccaacctgaagagcattttaaaaaatattcatggccaagagccacactgggagactcccattttattagtttggagagaagatggatatccatgtgttttaaaggctccttggcacaagccaagggctctggctgagaaccatgaactctgaccagttgttcataatctttactgcacatggggctcacctggggagctttaaaactactgatgtgatgcacgagtcccacccccaggaatgctgctatgattgttctagggtgtgcaatcgggactgagacccattcctgccttggagggtgggccctgagccagtctcaacattcagggaagaaagaacagagagtgcctcagtgtctctgggtaaagtgcagggtgttgcaattgcagagaggggatgctggttggttgcaaacaggcacttggacctgtgaggtttcctcagggctcttgcagactcttggagtggtttgcatgcacttggtaagagtattaaagcaccaaggggtcatatagattcccacccgtgtttcccaaagtcccagagtagagaaaaggagttactgactgctttctgcactttctgtgggcacagaagctgagaggggctggagtcctagtgggggatggatgagtgttaaggttggaaaggtgtttgaggatcaggagtgaagaaccttgaatgtcagggtagagggatctggctcttattctataggcaatggtgcatcttggaaggatttggggcacatcagtttgggacatagggaggggaatgtgctcagagctgagtttaggaaaattaatttgcagggataagacttgaggaagacactagaacgaagagatgttgactagaagcagttataacgggtcaagaaaggggtgatgtttgtcatcctttccttagaaagaccaagaatatacacttggtgttgttcagggtctatgatccctcccagatctcacttggtatgaaggatggaattctgttcagacaaaggacttgttcaggccaaagagccaaactggtcccacaggcgtgtgaatcaggctgtttgagaaggactttctgaatggtgtttcttatggaaaactggaaaacacacttgccagcaagtattccaattcaaaatactaaattctgagtcagcctgatacctccccctgggtgcatttgagctccaacttagagatgggcactgcattgggtgactccagttctcttgctacccgctcctactccttgacagaaggtgatatggtttggatctgccttccaacccaaatctcatgtagaattgtaatactcagtgttggagttggggcctggtgggtggtgagtggctcatgggggcagcagtttctcatgaatggtttagtaccacctccccactgcccttggtactgtatagtgagtaagttatctcaagatctggttgatttttttttttttttttgagatgaagtctcactctatcgcccaggctggagtgaggtggcatgatcttggctcactgcaacctctgcctcgcgggttcaagccaattctcctgcctcagcctcccgagtagctgggactacaggcaagcgtcaccaagcctggctaatttttgtatattttttagtagatacagggtttcaccatattggccaggctggtctcatactcttgacctcatgatccacctgcctcggcctcccaaagtgctgggattacaggtgtaagccaatgcacctagtcgatctggttgtttaaaagcctgtaacacccctcacccctctctcttcctctggctcccgctatgtgaaatacctctctccctttttccttctgccatgattgtaagctccctgaggccccttgatgggtgcttccatgcttcctgtacagactgaaggaccatgagcctattaaacctcttttcttataaattacacagggttgggtatttctttatagcaatgtgagaatagactaatacaggaggcatcttcctcctagtattttgtgtctttcatcttgttctctccatatacggagtggtgtggggaaaacccgcaacgaggtaacgatgggtggagaagaaggtgccaagagaggcttcagatctcttagccactcaaccaactctgtccactgatggcttggatgagctgggccctagcaagctcaggaccagcccagggagacttccctgcacccctccctccaccacgcagaaagtgtaggccctcaccttccacccctggcaaccccttatgtcccccttctgcttacaagcatgcaattactcacaactccaagcccaagagggggttggggaggggaacagctctacttgcaaattactgaagattgatttgcatcactttcctttaattatgtaagaatgtgttagaaattattaggtaaaaatttgatgtaactcttcttcaattaaacacagtgatggaggcaaaatctctattagtgtgcaaattccttgggagagcatcttctccgcacagcggaatgtctattagctttctgccaaaataaaggtcaccagacgggagccttccccatcacactcttacttccatggacatgcagtgtaatcaggcaagatgtgtcacactcaggaaaccaatggtgccattatactgaatatacccagtgcattacaacctggtcccctgttccctaaaggtgctcagaatctcatagatcctggagactggcttaagagaggggaggacagatgtttagttccaagagctggagtttatccttcctattgtcctgattaaaggaagaggcaaataatcccagtgcctcttgaaccaccccaagtacaagaagctcactgtgggtgatgtaagctgcaaagaatatttagagggagagggagagagagagagagagagcctcaatccacaaactcagagtgcaagaatgcaaccttcttcatttttctgcaaaaacttaatgcttactttgagtcttcattctgttgtgtgacaaattaatatcagattgttttcagttcttgtccaggattggtgtaagtttcagaaatttattatgcacagctaagtggctgacagaaggaggaagggttcagtgcttggtcttcagtccatgctggcatccaccaaaaagtgcatggttctgcctgattcttggttattgatttcagcaggccacagcttgcagcatctcacttatcacaacagaaaataggatctgagacatatttgcaaatgggtatttctaagagaaaaaaacaaacacatacacacaaccgtgggtacaagacacctttggactcagctagcccagcatctattatccttaattctggtaagatcacactgattttcttttgggagactagcccttctcaactctcagtctagattatttgagtgaaattgactctctatcttaggtctagaaggggagacgtgacttagccaaccggcccgttttgtcaccctagaacttcaggattgtccatggagggtctgcccctggaacttggctagaatggctttggaagaagcactgtttcctggggagatcactaaactggaaggctcaagctgggaatggctggtggcaatctgccacaggctggagacaacttgcctgagaaagaaagcaatgtggaagactacagagctgcgagatggaaagagacggggttctcaaggcattgttgaagccatccatacccaaacacttttcagttacttgaattggtaatttcccttctctgttcaggctagtttgagctgggcttctgttgcatgtaaccagaaaaaaatataagtagaacactacaaatctaaaagtgaaaatcattccagctcaagaatgacttatggacaggatagatccaggtatggaggggcctgaaactggtccaattttaagaaaaataatacaactttaaaaatacaaaaacaggcacagagcctgggaaggggcgcatgcaaatgggacccatggaatttaagctcctttagcttcattgcaattgggaggcctgggtacttgtctccatttccccgaaaagcctttgataaaatcacttcatctcttaaagtctccatctcaccattgagagcaagatggttgatctcagttaaatttcatccagctcgaaaaacaccatgtctctacaatctttgctgaggaaatgacattgcttaaaattatatattttttgatacttgcttgaataaaagtttctttgtctgtccaggacctgcctgggtgttctgatgctcggaacctctacatccttcttccatgcctcctacctgcgggccgctctactgggccagtgaattcacgacagctgttcatttctgccatcttggtaagcataaggccaacgaggaaaggaaggcagatcttgaaagaataataccaagctattgtactctcttaggaagtgtttcttcctcagctgtctgggcagagaagctttcttaaagaatgttttcatacaaaatttctaaaatgctgaaaatacaataagattaacggcccctggaggctatggcttaaatattttatcttcttagatatcagttacactgcactttcctccaaggatctaaagtcttttaaatatagcatctaattaatcctcctgtcatctctggatggaatagcatcattaccccaatttcacaggtgaggacacagaagctatgggaggggtgtccacaggcagaggtggcctgattccaatcagtagagacctcggccacagcactggtgactgacccaacagggacatcatcaggaaaagtccattcagaagatgacactcacgccctacaccacagagcttatagactacagccagcagtcaagaaaatggtaccataggaggctgggggacatctctgcctcccatacacagacaaggcctcagagagagagtgactcacctcaccaagaagtgacagattcatgatcctgatgaccgcatggccaatgaattacacaatcattgcgtcttcacaaacagaaacaaccactttattaatacagttgttggatcaaaatggtgtttttttggccgggcaaaaaaacaggcccacgcctgtaatcccagcactttgggaggttgaggtgggcggatcacgaggtcaggagatcaagaccatcctggctaacacagtgaaaacccatctctactaaaaatacaaaaaaaattagcagggcgtggtggcgggcgcctggagtcccagtgactcgggaggctgaggcagaagaacggcgtgaagccaggaggtggggcttgcaatgagccaaggttgtgccactgcacttcagcctgggtgacagagtgaaactccatctcaaaaacaaaaaaaggtgttttttttctccccaaataaccagataaccgcacagattgtcatttgcttccattcacctgacacctgccatgtgtatcagacatattggccatgcatgacctctgtttcccagccctgaaatgtacctgctgctaccctcattcagagaggcaggagacagcttaaacaagcttatcaaattggttccagcaagagaactagtggacaacagggccaggattccttccacaactgttttctgcctgccctgtttccttttttaaacgatttttattgtttagatccagtgttcagcaatgtggcccatcactgctggtgaattctactggataacacagcagacggaagctccagaaagagacgcttccacggattataaccatgtcaccatagtcaccaccactgccactgcttatgggaggtcaggtgtggggtcttgagaaggaggagttgaaactcaaaaatcacccaaaggctgtctcaaagaaaggtagttttctcattgtcaaaactcaaagttactcactcttaaatgcttttcctgcctccttttcgaatctaaagcatcaactacatagggaaagtcaggctgctttccaagcatcaaagccaaaagagtctcacttttggcaaaggtaacagggtttaaaagagaaagagagatagaaccagggagagagaggaaccagggagagaggaggctgacagtggaagaaaaggaaagagagggaggggagagagaggagagggaaaggagagagaagagagagagaaaataaaagagagacagaaagagggagaggagagaggaagaggagagagaaagagtgagaggagagagaagaaaagagagacaaagggaaaggagagagaggagggggaaaggagagagaggagggggaaaggagagagaggagagagagataaaaaagagagaaagagggagaggagagaggaaggggagagatgaagagaagagataaaatgtgagaggagcgagagaagaaaagagagaaagggagaggaagagaagagaaaaaagagagaggagagaaagaaaaggagggaaaagagagagagaagagaggaaaagagagagagaaagagcaagaggggagagaagaaaagagggagaagagagaaaaaagagggagagaaaagatggagatgtaaaaagagagcagagagagagcatgaacatgaatgagtctatgtcactgcgacagcaacaacaaaggaaagaaagaaggaaggaaggaaggaaagaaaaggcatgtagccatggaagatgaaatagaaagagagaggaaaatgtggaaagaggtggagaagagaaagaaaaaagaaaagaagaagctgctggagaaaccccagccttgagacgggagcctctgacccacgttgtaaaatgacaaggattgagtgagcggtttttaatacagataatattgtccgtgtagtctataaatataaaattaaatgctgacctctctggtccatgtcaaaagtccaagccagtgtcagcacatattgtttttatttgtttcaagagaaaatagatcaacaacattaacctcccaatgaagagagaattgaatgaattaaaaagcagagccataaatcgcaccggttttattggcaccatgataaacatgcccgaggcctcgcagggagtggggtctaggatattctcaataccctgcagcctctttgccaccaagaaaggaagagagatattaagaactaagaacggggcgctgttctcccacttccaccacctctatccatcaccatctgacaaaggctccagcacacgcttcgagaaaaatattgagaagaaaaagaacctagaaacagggcaatttggagaggccttcggggagccaggggtgcccaagcggcccactcgccagctgcaattaacaagaggacttgtcagggaagagggggaagctgggcgtgggatttccaggacacaactcacaggccatcagccggagagagcatcctgggggctgctggctggtcctctgccctctcccggctccagccctcctcagaccagtgggttatgcacacagacagctgcttgccaatgaaggaaacacactttatttccagcttaagaattcacaccatcacttgggcagttgctaaataaagcaccatttcccttatccatttcatgtggaccttttagcacttactttataatgattcagaaccatttttaattatgaagacttagctgaacacattcgtttacaaagaagagatattcacagacagttgtgctttctgctttgccagcctggcctcaggaagccatgcagaagaaaatttccaggaatttagagtgttcattcctcctgttcacaccccttcttaccttcattcacttcctcttttatggctggaagtctggagctagggtgatgagcagagtggagattgaagaaattctttaaagtccccggttgactttttgataactcccttagccaccaccagcagagaagaggaggactcagtgatttggggaaaagaatcttacatgagagaagtacgtaaaaggcgacataaatcgtactgaaaacaactttcgtttataaacaaaagaaaatgttatatatttataaaccaatggcagaccaattggctagacctgtaaaactcaaaaataattaccctttggaacaaacctacaaagcaaaagattcttcagctattaaactattttcggtaagtcattattttatgaagctattatttgctctaccatctctactgatttagttacagatattttaagtctgtgtctgactgtgacaaaactcggtcagggtgaccacccagttatctgggctcatggacatggtattcttttaaccagttaaggttacatttacttaattagatctgagaagtgttctctttggctgtgggagtatgtgcaggtgtgagcttggcacattgtccacaatctttccaattaggacttcctttttttaaataataaaaataacaataattgtggccagcacacacaggactcatggtgtgtcatgtattgctctaagggcttagcccagataaacacatttcattcccaccactcccctgccaggcaaagcattggctgtgtgtccagaaaacagaggcacagacaggtcacatcgtttgcccaaggttacccaataaatggcagaagtaggattccagccctggccgtctggcactggagtctctgctctaggtcactctgctgtacgcttcttcctttcctgggccctgtctggcagctccctgagtctctcatcatgtaattttaaaggccacatttgtcttttccagcctgtgtacaatgtaggttgccaagtccaccctgcccaaggccgcagtgtggcttagaagaggaatagctggaacttggctggaattgaccccaatctggtcacccagggctcccatcccctgacactctctccagtgtctctgtgtgtcccctctagtgggctctctgggagtcacagtcatgtcagatggtggaggttggcccagagctatttgtgctgaagcatttctcagtactcctcatggaaacagctccttgagatttaaactgcagcatcccggtcaccgggcatagggcggggaaaagggatgcccctctgtcctgcaggattctcgtctctcagtcaccagcatccgtcttttgtccaaacaaaagaatattcatgtaaactgactcaagcacattgcagtggggctggatttcagtttgccagactctcccaagcacttttagattgcagtttgcatgagggatgacatccactgttggaacacgaagcaggtatacccaagtcagtcaacaccatttccattttaatattaacacacacataaacaactcaaacctgtggcttcaatgaactgatttctctctctccagcagcccagttacctgagacatgttggacagcttggctctggtcagaatatatcacccaccatggcctgggacttcagagactacctgccgattcctctatgatagacatttgttgctgtgagacctgggaaaagttgctcagctactctgagcctgttacctcctctataaaaatgggaatttctaaagtatcaacctcatagggcttttaaatgcttttgtaaagcacctggcagagttcctggggcatagtaggtgttcgataaaagtgagcttgtgtatgtggctgatcttcctagtaatgcaaaatgagacacgtcacccatgggtgacaggcatctcccactgccccacatcccaggggaccaaaaagaaagtagctgctgataaatatcacattgctctcaaatgcacctattttgcagaattcttgggttttatccagaggcttgatgtcatatgatttcagcttaatattttcttttttattattattatgctttaagttctagggtacatgtacacaacgtgcaggtttgttacataagtatacatgtgccatgttggtgtgctgcacccattaactcgtcatttacattaagtatatctcctaatgctatccctcccctctcccccaaccccacgacaggccccggtgtgtgatgttccccaccctgtgtccaagtgttctcattgctcagttcccacctatgagtgagaacatgcatgtttggttttctgtccttgcaatagtttgctcagaatgatggtttccagcttcatccatgtccctacaaaggacatgaactcatccctttttatggctgcatagtattccgcggtgtatatgtgccgcattttcttaatccccagtgatcccattactgggtatatacccaaaggattataaatcatgctgctataaagacacatgcacacgtatgtttcttgcggctttattcccaatagcaaagacttggaaccaacccaaatatccatcagtgatagactggatcagcctaatattttcaagcctgttggtaaaacgtttctaacccatttccaagacagccttgggaggtaggtggtctgcccttagagaaacatctctgagaagtgggtctggcccagatgatgtagaatgtggtgcctctgggactgtcctagagggttctgtccccactaacacccagtaaccacacttccttcccaagacatggctaggaagtagcaagtctctacagggtgaacgtcctttcccaagcctgagcatagatggacgatcagatttccaagctgtggaaattcactctgatctgcttcaggcctaaacatcatacctcatctcccctccttgaaggagacctttccataagggcttagagacgtccaaaacaaagaatagaaggaagacctgcaaatcaaacacaaacaaacactatgctggaccccaagccaaatgcgttccatctcagctaatggagccagaaataatttctgttaatttctctgcctcttagaaagagacattttcaattcaggtaagatattgctgagctaaatgccaagatcttagtctcagaccatcgagatccagattggtttgtcagagaaatgtgagtcattttccgggggtgagtgttgaaaagaatgtcaggaaagtggctgtaccagcacaaacctattcacctttccaactactcaatgcccttgcattgtttctatagatgattttctgtttaggaagcagaggtcttgtttataatgatacaaagtgatgagtgagtccatagtgatgaggttaattaattcaggaggtgtagatactccaactgggtaattcaagatgaaaatatggagttcggcatgtgtgagaaataaaagtcttaatctcctttatcactctgttttatatagaagttttattaacatgtgctagggaaagagggcagaggataaaacatccacatgtcagccattttctctgagagactggcaggggtctggcctgtagatcttcagagaatgatgttgaattattacccaccattaggagggagtgttcatttctcatttgtctgggatagaaaagcttcttccataatactgagagctaatagctccacaaagagtagagtttgagttcctaaattaccaggactggctaggaaccaagtctaaactcgcccagctttccacgtctcactttccatttgagcacgagagataccaaccccagatcagacgtcccaggggaccaaggaaaaattaaccaggcatcaggctgctgataaatattacgtcctcctcaaatggatctattaggcagaattctaaggttttatccagaagcttgacatcatgtgaatccatcctcatcttttcatccctgttgctaacatgtttctgaagtactttcaacccaactgaagactgtgtgcccgcaaaatgaagggctcacttaaaaaccagtgattttccttctgctctgaagggggtgcaggcaggtgcatctctgctgccctgtcattatcaggcctcttgttggccctgcaggcaactgagaatcccccactaggggagaggaggtgccaaaggcaggcaggaggtgattggttcaggtattgatcaattcttactcacacatgacctttcacctccctcagagcatggcagccacagctaacgtctgatattcacatttgtaattaaactggaatattaaacatctgcatccatgacaacctgggcgatgatctcatttgatcccccatgcccagcagagagcagctcccagtgagctggagagagagtgcaccagggatgcagcagccacacagcctgctgggcaatccagggggtaggaggctccgttgcctttgcccaatcacactgcactgccaatcttcactgcttgggactggctggaagaatctggatgcatctatgtcaatgcaggagggaaactgagccatagcaatgagcattcactaagcatgctgcatgcccaagaaccatgttattgggccctgcaagtgtctcctcactcggacctcctggttgtacagatgaggacaggcccagggacccatgaccaatggctcagtgatggaaaccagagctccatgctgaagcagagcgttttataccccacaaagcacctcctaattcagtgctacaacttctccacacagcagcctctaagacattggtagggaaggatcataactattggcgataacagactagaggctcagcggttatgtctcccatttaagccctctacaggacactcataatttttaaaactttgcatataaccaaaagacaatgaagtagcaagacaaggtttagaaataatggtatattttattttttatttttatttatttattctttggagacagagtctcactctgttgcccaggctggagcgcagcggcatgatctcggctccctgcaacctccagttcccgagttcaagggattctcctgcctcaacctcccgagtagctgggagtacaggcgcacaccaccatgcccagctaatttttgtatttctaatagagacggagtttcaccatgttggccaggctgctctcaaactcctgacctcaactgattcacctgcctcagcttctcaaactgctgggattacaggtgtgagccactgcacccagcctagaaattatggtacatgttaaatatttactttttacaaattaatatctttaacacatagatgtaatatttttgtgataactgggatatttattaaatctgtaatacataagtacattacagatagtgtgggctggtgatggtctcttgcttaaaatcagcgtgacaaaaccatctgcatccgtgtgtaactgctcagactcaagtggaagctgagccagacctttgtatgtggaaagctctggttcaaatagcaccaggtctgaggtcccctaacccccaggcctctgagttttctgccattccagagcgttcaagtgagcaaatgttcaggtggacaattgtatgcctgacagtgaccatggggaggggacgtttctctgtctacgcacacagcctggccatcctgtatagttaaacagctcttgccttcttcccaaagatgcaagagttgattgctggagatttgactgacagtttataaggcattcttggatgcatcaagaccaaaggcatctataaacataattcaatcacatcaatttccattactctatgtgaaggagcactcttggggaaggatgtgctccaaactaggtcattgctcttcacactctggaaggtgacccacaggcagcagtgtatagatcattcatgacggtcttggcaggagaccctgaaggagcctctgaggacatgagcaagaggcagaccaaggactcttgcctgggaagctttgcaaaggacatctctaaaacttactggagatcagtcacgttggcttacttctgcagtgccagcactttgggaggccaaggcaggaggattgcttgagcccaggagtttgagaccagcctgggcaacatggcaaaaccttgtctctatagaaaatacaaacattgggctgggcacggtggctcatgcctgtaatcccagcactttgggaggctgaggtgggtggatcacgaggtcaggaggtcaagaccatcctggctaacatggtgaaaccccgtctctactaaaaatacaaacaattagctgggcgtggtggcgggcgcctgtaatcccagctactcaggaggctgaggcaggagaatggcgtgaacctgggaggcagagtttgcagtgagctgagattgcgccactgcgctccagcctgggcgatagagccagactccatctcaaaaagagaaagaaaaagaaaatataaacattagccaatgttgtggtgcacacctctagtcctagctacttgagtggctgaggtggatcatttgaacctgggaggttgaggctgcagtgagctgagattgtgccactgcactccagcctgggcaacaaagtaagaccctctctctcaaacaaccaccacaacaacaaacttacttggcggggagcaagggaagatgacaggggtagaaaaacatatgttgtctgggctgtccaacactcattttcccctttcatggtcactcaatacatatatagtccttggggaagcacctctccctttctcttggtcctcatcttttgtatgggctgtgtctactctaggcttggagggggccattcagagcattaacatgccccctacatcacagacgcacgagtgttcccatctccaagaacttttcctctagtgccttgttcccagccagtgacccagaggactaagtcatgttaatttacactaaaatgttagtgactgaagagttccttgttgtactttagacagtacttgattgtcacagggtatttgaaagccatggactttgttatcagatcctgtcccaacttcccttatagtggttatttggccttgaacagaacaaattgtttaaccttttttggccatagtctactcctttgtaaaatgaagttagtaatatctacctcttctgtccttttgtgatgcagatatttgtaaatagctcagcacagcatctggtccacggtagcacccaataaatgaccaatgtatgatcagggttggagtgggcaggaagaggccttcatgcattcatgagtgcttggtgtctgcagcaatacctgccaatgctggctgtgggcagaccacccctgcgcctcatttgggaccctcaccagggtcaggattaatgtcacttctctgcatggtagttggaggtatatttctcccctgaaacccctttgaactttctgattagcacagagaattggcacttgagctggcacctggagaccatggcaaggcaagaccatgaaggcaaggtggcaatgaagtcaaactggtgcagcagaaagagcactagagtgggagtgtggagttctggccaactgcctccctgtctcctgctccctgaagatgctggtcatgtcattcttttctggttcactttcccctcacatggctgagatgaggatcctggggttgtttcataaactgaataagttcttgctcacagccaggtcaggaaggctgcagatccagaccctcctctgccattgttagcttccaagggtagctccagcatgctttattcatgagccctcatgttgatccaggagtttgcggagatgtggaaattagggaaagaggtaataatccactcaggtactgttagggactgaatgtttgtctccctgtcaaattcctatgttgaaattctaagcccaagagcaatggtatttggaggtgtggcctttgggaagtaattgagggtagattatgtcatgatgataagagccctatgatgggattagtgcccttataaaaagagtaggacatgggatctttctgtctctctctctgctttccactataggaggatccaaggagaagacagctgcctatgaaccactggatctgccacttccttggtcttggacttctcagcctccaggacagtgagaaataaatgtttgttgtttaagtccccaactatggcactttattacagcagctcaaactgaccaagacagatgcacagaatgaaattctccaggggaacatgaatcatgtccatctgaccaggagctaagtcacagttctgaagcataattgggaggaggaggaggaaaacacctttacctacacttaacccttcctttggggttcatgaaaggacatttattgcacatatcaggtctacatataagtgtgcatgtatacatttatgtgcatgcatgcagagacacacatacacttgcacacaaacacatatgacacctatctgcagcatgcacaaacacacatattctcccaggctattggaagtcctgctatgagagtaccataaccctgagtgttctcattcatgtcccagatctctttcctacccagactctgggcatctgacactaagcctttcttcaacttccaaattcaatctgctactccaggctgctctgaaatagtgggtatgtatcagttagttcttgctgcataacaaaatgccccaaaatatagtggcttagatgacaagcaaccacccagctcactatctgtgagccagcaatgtgtgctgggcccagcagagtagttcttctagactaggctgggctccctcatgtgtctgcagtcagctgccaagtcactggaagcctgaatagtctaagataacctcagctgggatggcacatctcactctacatggtttctcatcctccagaaagccagcctgggcttgtcaatatggagttcacagcgttccaaaagaaacagagcagaggcacgaaaggccttttgaagctgaggctgagaaatgtatgttgtttttctctgctgcattctgttggccaaagcaaggtacatgactagctgagattcacacagagggagagggagtctacctactggtggaaagaatggcaaagtcacattggaaagagagaggggatggggggcaatgccattttttcaaataattaatcacaggagagatacagcaaagggccctggtgatggcctgtagaattaccaggagtcccaactaagccacacagggcctgggtttcttgcggctccaccctcacaccttccaccccttccttgctgcagtaaccctgctgtttcccctaaacacgcgaaaaccattttgctctgctacgtttttcactgacagttgagaatacttttttttacccatttatgggtgcaaattaatgagatgacaacagactgaaaccaatgacaactgctaatctgtaagcaaaaacaagggatgaggagccgagagcagtgcagctgttttattttaattgaggaatgattttatgttaggaacactcaatattcacagcaaattaaaaataatgaagtgaattgataccaatgattttttttttttttttgcttactttccctttgtaaatctatttcttcacacaaattgacaggtctgattgatacatacgctattattcctcattagtaggctgaataaaataattcttgattaaatttattgcaatttaccaatacagcataatgtttgcaagctataaaagtcaatcaacaggaaagcagagggaagccaatgatattatttcattttatataacacataagtggcctccccgtcctggtgaagggaaggccatcacaagactcccaagtgggcaacacacctcaaagaaggggctccaaacccatgttggttttcatgatcatcagcaggggcttcaagagatcacctctccctctgctgctggcctgggctcgagccatccctgctctcctggcctacccaccctcagctgagccttgcgccacttatgattttaagctgcagtgacttcctggggactggggttggcaatgaaacctgtcacctacacccatcccaatctagctgaatatcagaatagaggctgcctagagagagaatgagagaaggaagccacaccatggcctcctagatcttgtctactcaaggcacctatcttagggcttctgagtcagatggagtcttgagtcctgagtccaactgtcctgctgtgaagtaagatctccttggaagatctgcctccctcttctcagatttcacaccctgccagcaggaaggatgcatctgactccatggatatgctctgtttggcccaccaggatttaaacaagtatataaacctttcaaaacttggagattgcacataaacccctggtttccaggtttctcttgaagatcaggaatatctggctctgtgaaacccctttctgtgtgtaactgagccaagcagcaccccttgggtgagaatgtgttctctactccccattgtctgtcattctgttcccttccttgttttctgtcacctgcctgtcccgaaggtatctaaatctgtgacttctgcagtagatgggctttgagtgcttagggctttaccctttttactgctggattgtctcatggtgactgtgcacctagctggggtgtaatcggatttaataggagatatataaacctatagcaacaccatagaggatgccagacttgcttaaatgcctccactagcgtctctcctgtgctggaggctctcatcctccttctccagttccctattcaagcttttaagttttttaccctgcagaacctcctccaccctcatcaaacacatcccttcggtgtcccctttcccatgatcctggttgttaggctatgaagtaatgaatatcctctctcttcaaggtcacagtgatggggaagtgcctcctggactcctaggtccccaagtctccacttagagcagttctccaatggggataaaaactaggatgggtattttgactcgacagacctttgcggagcctttccaatcagatcctctggaacatagtaggtatgcagtcaatgcttttggacttgaattctaagactaccttcctgattgtctctgatagttccttatccttctcagtagagaatgtttttctcaggtctccacatcctttggggactacaggtacatctgtcctagaaatctctcaggccaatggctgggctggaaatttatgaaaccattgatcaaggaaggttgtccagccatgcatgcctctggcttgtgcagatgacaatgagcctgtaatcctgcaggtcacttgctcctgactgcctcacaataataagaggcccttcagactcccttatagtaataagagctgctaataagtttgaagggcttactgtgggccaggccctgtgccaggcactgcccatctatcttgttcatcctcaccaccacctttgaggtgagtcctgttatcaccatcctttaggaggctgtgcctaactgaaatttctaaactatgcccttcaaactgatgccagtcttgccccaatattcatggatgagaatacatgacagtctatcaacaaataattattgatccctcgataaagtgcaatactatcctgggcacattgatggatagaaaattcatatgagacaccttccctgtccttcaagaacttatcatctatttagggagatgagtctctgtattggcaataagtcaagtacaaaattgttttatacaatgataaaggagcttagagagggggaggctggtaaagtttggagcaatgaaagatggttcctgaaagagccaaggctttagctgggcttaaaacatgggggagaagaagcgcacctcctcccccacgtccctggcacgatctcctgcagctccttcattcctacccagcccttcttggaaggatgttcacggggtcatcagcctcctcccatgcagtcatgataggcaaaattagaccacctgacagaagctgtgaggaggctgtttggcgtaagtatgagagaaggactttctcagaatcagaactacttgttcaggtaaaaatgatgagtttcccatcactggggggtttgaacaagtctgttgtcatctgagaggttgcaaaagggatttgaacatgcctccaggtcccttctcctgcggccctggcattccagggttctgtgaggcacagaggcagcagagatcccctcagggggtgagcacaaaagacagggctgataaggaggtatccctggggccagagaagagatctcaggcacaagacagcacatacaccgccaagtgcagtgacagcagagggatgcaaggcccgggaacatggaggatgctctgctggtgattcccagggccagtacagaagtgtgcatagctctgcaaaggcctgagccctgctggggactgcaaacaggccagcgggctaggcctgaggagggtgctccgatgctgggaaggggacttctcacagacatttccacctgaaattccacaggaacaggcacaaagtacacagctcaagtcctcccaccccagcctcctcctcttcctcctccactctctcctcctccccctccccctcatgtttctctttctcttcctcccccttctccatccctcgcctcctcctcctcccctttcttctcttcctccccctcctccttttcctcttcctcctccccctcctcctcctcttccctctcctctttctcttccttatccccctcttcctccccaacctcctcttctccatctctctcctcctcctcctctttcttctcttcctccccatcccccttttcttcttcctcctccctctcctccatccccctctcctccaccaccttttcttcctctccctcctccctgcctccactccacttctctatctcttcctcctcccccttcacttttctcctccccctcatcttcttccccttcctcctcatcctccccctccttctccaccttctcttcctctccttcctccccatctccactctacttcttatccatctcttcctcctcctcctcccccttcacttctctcctcctcctcatcttccttctcctctttattcccagttccagggaagagctcaaccatatagactcaaactataaacctgggagacacctccacctccttcatctggcaccactgcaccatcccatgcaccacccttcataacacccctaacattcactaagttagtcttctttcctctgccctgtcctggatgtagctcaggccatccggccgtctctctcacaagtgccctgtgccatgcacacaggggactgcatctgtcttttccaccactgtggcctcagcacccaacaaaatgcctgatacaatgcaacaataataataataataataataaccatcatagtacggtcccttacattagaaacttatggacaggcattgtataaacgtcttatgtgtataactcgcataacaattctctagagtgagtattattattaccattattcacaactgagaagaatgagcctcagaggaaccttgcctgaggtcccacagctagtaagtcccagcaccagaactggaaataggtcagctccatctgaccccagagtctggtttcttaattcttaggctgtgatgcctccatgggagcttagtgcagatttgctgattaaatgaatggatcactgcaacctctcagcagtctccttgcccccagctgcgctccttccaggtcatcctccatcctgtagccaccacagtaggtccttaggcatcagtctcttttcctgcttaaaatcttcaatgggcctcaggatgtagcccctccctccctctccatcagtgcctctcttcactgctggtcagctctactgagctgctctaatgtcccctgaatctgctccgtgttgcttcatgtcttgggccattgcacaggctgaccttgctacgctgaatgccccctcctctgttgcaacccatctggagctctctgtgcagaccttacctcctcttacctgatcctatcagcctaaccaagatgcctgtctgttgtgtccctgtgtttcctcgcacttatccaacaggtctgtcatggccaggcactctcgctctctgcttcattaaactgccagttccttgaggtacagggggcattttgcccactctgggctctccattggccagccccatggcttacacataaatgtcagtgaccgccatcaatgcctctttgtgttaatgagctgatccaataaagatatcagtgaacaaagacacaaaaggcacaatttacatgggctgcaggaatccccatcagagaaaactcttcactcttggagagacaacatgaccatgtagatggatgatttcaaccattggggagcatcatgatcgcccagtggactttaattaaagcacagagtcctggaccccaccccagagtttctgagtcagtgggtctgtgaaaggaacagggaaagaggagtctggaaatgtgcatttctagtaagtttccaggtgattgtgatattacagacccaggagccacatttcgagaaacatttcttttagaaaattctagcaaagaacagtagtgtccagtaagactaggatgaaatgcaggaagagaaatgaaaacaggcttctgttccctctcgagggtgtaatgttgcaaaccttactgtaaagccagcaatctgaacaagagcatttaaggggcggccacacccggtccaacgtccgtgttcaagtgcatcccggcctcttgtagaggaaatcctggcttcctatggacacacgcatatgggaatagccacactcaggcccaggctgcagacaccagacgtctgagtgcagggcacaggtgttcctgagatgccccgtacaatgggtcaccaaaagctgactgagtagcaatgcaaacaaagaatgacccctcctcgccggccgacgggagcggctccaggcaaaccaatggcattcccaaacagcgtgaacagggaggaaacaaacagattcatctctgaaatttgatacccgttccagacacaagtagcaacaaacttagcgacaaagctgtcaaaatatgttccacagcctcattggcaagagatctggacacacgaaagaaattcagcaaaaccacatcagttgccaaacggggaggtttgacagtgtgttcgggaatacatttagatcaaaacaggaacacgtccaaaggagcaagtgtctccataaattattatgggatgattagaaataattagtcagtgatttcaaaatattacgtacatttttcagtggtattgaggggacgtgttatacaacgtgggattttgtttttgcattggggttttctctttttttcttattgctctctggcagtttgtaaaaatgggggccatggaggcagtctcacaccatgcaaatccctggggcttaaaagaatacgtttttaggcaaccggattcctttgcaaagcttccattggaagtaacatagcggggaaagagccttgttcctttctgggcttctttgtaagagtcagtctctagttgctgtccctgggttagagtttgttatcaatggggtgagaggatttacattttcaaaggcctctaaaggtgcctgggccagctcctgattctataaggctcagagaggtggagggaggcactcaagctcttgggaaccagaaccaagagccgggaaccagaaccaggaaccaagaaccagaagcaaggctggactccctggcctcctgactcccagactgctatcttgggtcagcagatagcaagaaccagaagggtccagtggccttaatgaagaaaccccactctagggagagttctgtggggcacgtctgttcccagtgctctgccacattgggggaagatctcttgtccaggccacaaagagacacctgatggttctgccccaagagcctcctgccagacctaaaatagccaccccaaacctggaaccctaagagttgacaatgctccttcaagatttagaatcctgggaaggcaggcctaaaagggagtattcttttctccccattttacagtggggcagggagagtccggtgctgggttctgcacagagcagagtgaaaatcccagccctcccaagtccccatccccaaggggctcaggggaacccactaaagcacaggccactgcccctgatggccctagctttttctgccttctactcaagagttaagacttaacatcctgctaaggggtattaacttttaagttgccataaaaccaaataattatatttatctatttgttttaactctgggcatggctaagcatacatacggtatatgtacacctaaaaagccagcaagcacgcctgctgcaaggggcactttgcaaaatgaggcatgaggaaaagagtcaaatctatgtccctcttctcaagttccatttgcagggagaagaagagaaaggaggaaaaagaaaagcaagactttccgcacagaagcaggccttcacagttacggccttttacaagatgatcctgagctatgtttcctgtctctgagggaggcaccagcatataaaatggtagtgaatttgcattacttccaatccatcattctctgggtatgcaggaaaaaccaggggacccgctgcaacaaagctcagccttcgtgttgacagattcttatttaagtgactatgaatacaacaattccacaaataatttgtcaagtgtgtggctgaactggctctgaaccctgataaataccgactctccttccgctacaaaagcagcgtgtttcgtgtgcggacaccgtggagcgggcacaaggatttaacaatcaatgctactatatttctctcttctttgtggcttagcagaacaaaacacagaaacaactttgaagggtgccttttttttttcctctgtgttaagtacccagggcagcaaggcttggagatctacatcacaagctgcaggctgatggacaagggggtttcttggcagatgacgtggatggccccctgcccgcagaggcctctggcttccgctttgaatagggtcaccctaggcctcaggctttccaggtagctggcttcagcactgcatctggcaccttgtttgtagcctgggccgtaaggatgcagagaccatgcaggacagtgacagtgcacggtggccctgccgtcagacccacgggtctagaagtgcctggaagaatgggtgacacatctccttgaacaaaacgtaaacctaatcatctttgaagactgcaatatacacctaaatgtctcttgcagatgtaatttaggatgcattattaatttatttttcataaagctccccagctcctgagagggtgagtgagagcacagagcctctcggatgataagcctcgtttgtcagggaaaggcgggcacaggcataaaaacaatttccctcctaaaaacccatccaggagaaggcacggactcttttcagggaacgaatcctcttgaaactcgattattccagacgttttaataaagtgccgacctctaatgggacatgaacactcccgtgccatttgcaaagtgaagcagtaacttccccaggctggatggccaggagtcaggaggggtgcctatgcatcaattacgcatcaattacagggaaactttttgactttgggacagtggtgcctatagaaatcattaagaaagaattaactcattctaatacaaaacactaattatttattgtttataaagtaattttaaataacgcaaaggctcatgcagttgggccatcatgattttccagtcattaacttaaccagaatttgcattttgggactctagccagtgacttacatgcagtccttaagttatttttcaaacaccctgtcctatcttaatctattcatcattaatcacatttggtcactttacatagagaacactattcagatgaaagataaaagaaatacattaataaaactaaagcaagttggaatacttcaaaacataaggtaggggatgaatatggttatcaaagcaatttatacagtgtgcacttagtgttaaagtgagactgttaaagtgggggagctgttgcttattatttaaaagagatggtaaggacgagctgggcttttagtgcatcagacaccctctctcactgttcagaaatgagaggatgcatctaagagggtctcaggagtggctttgccttccgcagttgaggcaggtcaaaaaagccgggtggtatccaggcacttctccaacccaagatcctgccaccggtaactacaggttggcctggtgaaggcacagcccctggaacactcagaagccactctccgggcagatccatccatgctccatgctgtgactctggttttcttggggttcacagggagctcacgctggcccccttcagtggcaccagcagcaacttgactggtcctctgggacatagggaatggtcttctgtgggttcctggacattctgggcacagtctccttcttggagcatgaacaaagctcatgggaccccggcagtcaaccctggtacatgcctcatgggccaccgcccagacaccatccctccccaggatggccttcaccatcatccctgcccaggggagtgtgcttgcttcccagaccaagggaggagaagagaaaggagtgggaagggagacatgggaggaaaaccaatgcagggagaggatgaggggaggaaaaagctatatctgctgccacttccttcccgggcagaagacctcacaaatgaacctgcaacattctgagccagccagggccacggccttatctccacactcacaagcagtccatgctcccctgggcagagcccatgccgagggccaccctgggtggagaaagtgtctgggtggtggcccaggggcatgtaccaggctggacctgccggaatcccatgagaactggtcagagaagtgtcatgcccctagggatttctgcttcatcctaggtgagagcagggatcagatcacagtggggccatgggttctttgctggactcagggtcagactgacatcttcagaggaggaaagttgattccctgcacagcctcagagctgggaggggaggggagatgattaccccaaagccagctggtgctaatgcggcagccagccacacttcggtaagtagatgtaaagctcagtttgggagcaagcactagggaaccctgatgaccagcatagttttcatattggatataaaactaagtggggcagacaggagccaaggagagagaactttgagaatgtaattaaaacgttgtaaatatattttgtttgtttgtttgttttttgagacagtcttgctctgtctcccaggctggagtgcagtggagcaatctcggctcactgcaacctccacctcccaggtttgagagattctcctgcctcagcctcccaagtagctgggactacaggtgcccaccaccaaacccagataatttttgtatttttagtagagacggagtttcgccatgtaggccaggctggtctcgaactcgtaacctcaagtgatccgcctgcctcagcctcccaaagtgctgggattacaggcatgagccaccgcacccggactgggaagccatggaagatttcaaagcaggagaaaagtggtccacagtgcatggatggctgcaggttttccataagtgttctacggtgcggcacccgggctacgatcatcaacaaagttactgttgacagaaaggcagccctgcacagacaggagactacgtctgcttgattcacctctgtattttcagcacccccaacagctcctggcgcatagtaggtctagtctgcctgcctattaacaggatgctaaataaaactaaatacagtggaatggttttaatgatgctaagcacagttcactgcttcacactgaaaggcttggatccagatgtctccaacaggcacaagaatcctggaataaacagtttggattgctatctcataccctttgggccagaatcatgattattttcctcataacacatttggaagcccagacatgtgcagtgctctatgagactaagccatggcctaggccttgctgggaggaaggggctgtctatgcatcacagcagaagctgatgaagggacgtcccaccgtggcccataggaccgtaggccatggctcacggaatcgggtggtagacggcactggatgagcatgcagggaatgtgggcgtcaggccttggaacacttaggtcttgcctaagcatcagaatacagggtgtgccaatgctctacagtcacactctttaaggttgtgtcattgctgtgagacgggagggagagaagatggagctggggaggagctagccatgtcgggggcaagacagggacctgggaaaagaagtctaactttgaatagggctgctgacctggcaggggagacaggccctctcaagggtctagcctctgatggccaacatgtactggtcagcacagctcctctaatccctaggggacaatgtgatgcaagtgtccccatgtctggcaccacaagaccggtctgggagtgagtttgtagtcagagcacctggggtgccatctgaataaagaagcgaaagaccatgaaattaaatatttacttccatggcatgccccatcttactggacctgtcactccaccaaaacagaattcaaaagcaataatgccctgcccttgtctcggagaatggtgggctgccgtgtggtgttgagatgccatcactctgcagtttcaccttgtcatttgagctcaggtcaaagaatagaatcattttatgcgtgcctttcaaagtgtctcccccaagtttctttcacgcaacaaaaatgcctgccaaaagaaactggtttctgaagtcccagtcaaaaaagtagtaatgttctatccacacattaatgattccaaaattctccattatgaacaatatttatcaaaaacagcccactatcagatgaaagatgtgcctcatcttttcttgtcaactaaaacattattcactgaaagtttctttcatatctgtttcaggggtttcagtgtcattttaaattgcaaatcaatcatacatctcgaagccctagttctgtaggggagattaacgctctggctaaaattgtttacaaagccatttgtaaaccctctgcagatgcagatgaggcaagtttaccagtttaacattgttgatcccagagaaagccttaagcaatgacttcagagggcaaaaaaatttgttcatttatcattattgtcatgggctttcgcaaatgataacaatttgtcttcatcctatttttagacaatgagccacaatagagtccagaaagccattttgccagatgggagaaggtgctttcattgcaaaatgttgtcttttctttctctgccctataaaattggcttaagtgagaaccaaggatatgttttaatgtcaggattcccagaagacataatgacatacaataaaagcattgccaggctcaggaaggatgtggttcaaatgcattgaatactattttcaatctaaaagagtgacttctggggtagatagaagcttagtaacagtgtggaagatagttatgggttttagcatgctttcatcctttattaatattccccttttttaaatgaaacactgcaataggaagcccaattacttctcattaagatgaataaaaatgttagaataagctggacataaaataaacatttaaagtgatatatggttaattcctccgagctctgaaccactaatcaggaactctctatggaagagaagataagaaaatccagttttcattagaaacgttgcagattctgttgcatttcctcaagctcctggcttgttcacatcagctggtttctggcagcgtccttggaaggagggctgctcttatttctgggtctctggcagcctgggtctctaggagtggccccttccccaaacagcccttcccaccaccctgctgggatcgatgcatcggctccctcagccctcctgggctttgtaagcttgtcatggataatcattttacggttagtctgcctttagcacaaaggaatatttcacctgtgttttccctctatggagaacgataaacagacaagccttacaaagatcctgtaggaaaatgtcgacaccagggacatcctatgtggtcctttttggtttggatacagggccagaggaacgtaagacttcatttctagaaggctttattgtagatctgttattttagcaagcaatactattgattgaaaatactactgttactcactggatatactttggagaaacatgagagctttaccgagcattaatccatctaaaagcgaatttccaaatagtctgcatgcacacacacgcgcacacacacacacacacacacacacacacacacacacacgcatctctgaggtgcccaagagcagaggctctcgtttggggagcaaagggaagctgatccctcagatgggtcgttggcatgtacagtagggcagtgactgtgtggagctgatggcctgccgagactggttgccttctttaatttagcaaactgggtaatggccccgtttccatgctcttcgtgctgtccgaattgcagatccagctggcagaagcagctcctccacctgccatttccttaaaagcaaacaaggagacaacttttcagtgtcatctctatcttcatcttccttgtggctctttacttctgatcttaattgcagtcccattcgcaatgccctcagccagcttgccccatctgcatcaaacacacctcgctcgttcctttctctgcccttcctctgaaagctgaatctgccttccagacaccactctgttcccagttttatggaggtctccctagtgaccccagtctcagggaccctcctcgtccacgttctctactgcccggcttgttagctcaatcagaatagggacagttttatttcgtaatcaggactggtttttattgttgtcatttgtgtgatgtttttgttattgctgatagaacagtatttatgcatttgggattgtattaatgattttaagaaaggctaggacaagacatggttctataagtaaaatgcttttaaaagttttattttgtgtgataatttaaatcatagaagcattcatttatttgcctatcttttttcttttttttgaaacagggtctcactctgttgctccgttgcccaggccggagtacaatggtgtgatcatagctcactgcagcctcaaattcctgggttcacgcaatccccctgcctcagcctccttagtagctgggaatacaagcatatgccaccatgcatggttaattaaaaaataataataattgtagagtcaggggtcttgctctgttacccaggctgttttgaactcctggcctcaagcattccttttgcctgggcatccaaaagttctgggatgacaggcatgtggcaccatgcctggcctatttgcctgtcctcttattgcaaagccaagtcttcttctaggcttatgggtctgctgattggtgtttcaggcactctttcttatataaaccacaaccataatacataacctacaaaattattacagtatcttcaaaggggataaaaaagatcctcacaaggcaaaataagtgtgaaattcctccagatttttggggccagtctctatctcttacatttgcttctcacacctaattttctaccagtctgcattgaatctttacaaagcaccacatctagttctcatagacaccactacgtcctttacactcttatcacatctgagcagcatatatatataatatatatatattatatatataatatatatattatatatatatattatatatataatatatatatattatatatatattatatatatattatatatatattatatatatatatatttgttgttgttgttgttgttcttttttgagacagagtctcacactgtcagcagggctggagtgcaatggcgtgatctcggctcactgcaacctccgcctcctgggttcaagcgattctcctgcctcagcttcccaagtagctgggattacaggcgcctgccaccaagtccagctaaatttttgtatttttagtagagacagggtttcactatgttggccaggctggtctcaaactcctgacctcgtgatccacccacctcagcctcccaaagtgctgggattacaggcgtgagccactgtgcccggccaatattttcttatatgacatacttacaataacaagtacagttgacagattctgattcttggtaaacatacaacgtgtgactggtgggaacagaagtgtgcagacattctagagtttggaatacttatgggagccctaaatatcagttgcgattttacagaaggaacagagtgtatctgttatgttggttaagttgagctagtctgttgagttggttatgcatggaccaagccaagaatcttggttgtgttacacttagacctgggttcaaatcctggctctgagacattggaaaagttagcttctagatctaagcttcaattttggctgggtgcagtgactcacacctataatcccagcaccttgggaagctgaggtgggaagatcacttgaggccaggagttcgaaaccagcctggtcaacatagcaacaccccatctctacaaaagaaaaatcaaacttaaaacattagccaggaatggtggcctgcagtcccagctacttgcaaggctaaggtgggaggatttcttgagcccaggaagttgaggcagcagcaagcagtcatctcaccactgcactccagcttgggcgacccaagagtgagaccctgtttcaaaaaataatcatcatcataataataagcttcaatttcctcatctgtaaagtgagggcagaaatggctccatagcatagcaaagttgtcaagagattaagttagatggtgcctgtaaagtgtttaatacaagatctggcacatgggaggtgttcaaaataagtaagcgctgcgagtactgctgctggtggttccattttattctcaatgtggtaaaatacacataacgtaaagtttaccatcttaaccatttttcagcttgcagctcagtagtggtaagtgaattcatgttgtgcagccaacctccagaacgctcttcatcttgcaaaactgaaactcaatactgattaaacaacacctctgcattctctcctggtccccagcccctagcaacccaatcacgcccatttttgaccctgtaactattgtttctgccatcctgcatttcttgttactctgtgagtccctcccattcaagccaccagaggctcattgcctcaaagaagaggtgggctaacagaaaagagaaaaataactctcttaggagctttcacgtctcaagcccaagcctggaggagtagagaacaatatgattgatcagtgcaaggtttcctcctccagagactaaacgaatgcagtggagggaagaagaggaaaaggaaataaaaagcttaggtgctggtgggtccccaagaagggcctggtactcagctatccctgggattgagcccgagcaagaagataagaatatttgcaggctacccaagcaggaatgaggcactacccagcaaagacacaacactggacagagtgatgacctactatggggaccacaccaccctagtcctaaagacaccttgtcattatgtaagattccaggaaaatctagaaagcccacaacgtggctaacattgttttcatcagaatgaaaaactgaggacctgaattaaaaatttagctgaatcaggccagatgcagtggcttgtgcctgtaataccagtgctctgggaggtggtggtgggaggatcacttgaggctaggagttcgagaccagcctgggcaacatagcaagaccctgtctctaaaaacaaacaaataaacaaacaaacaagcaaacaaacaaaacaaaacaaagcaaacattatccaggtacagtggcatgcacctgtagttccagctactcaggaggctgaggaaggaggatcatttgtgcccaggaggtggaggttacagtgagctatcattatgccactgcactccagcctgggcgacagaacaagaccctgtttctaaaaaaaaaaaatttttaatttacctgaataataagaaaagcactcagagatattttttctgcactcctgatcttgagcactggggctaaaagctgctctattccatactctgccccctttactcgggtcctgggatgctagtgactacacttcacactgtctcagtctactgccttgctcatacttcaggcccaaggggaacaacatattcccacagcttatgtctgattggacaacagaggtcatgtccttacccatgagccacatcctgtggccagtgggatgagatcattctgatatgcctcagctagagccacatgccccatgatcagagctggtaaagcatcaaaatcccttgaagcacatgagctatatgagaaaagagtaggaaccaaaaatataattatttatctattaccaagagaaggaggattgaatgaatgcatttgctgtatttccacttggtgactgagtgtcctggtgggtctgtgcctgtgaagctgtgtgcatgcatattcatgcttgtgtgtgcagtggggtatgggtgggagtaggtaggtaggcaaaagtcacccaggtattgtcagaaagtgagttcaggctgggggctgtgactcttgcctttaatcctgacaccttggttgctgggtgtccaggggtctggacagtcaaccaccaagtggaaatatagcaaattaatttgcttgttaatattaataataatatcaataaatattaggcaaggttttattgaacatccattgggtgccaggcagtgaatcaagctaacacaaatccctttcctcaggactcttacatgcaggaagaagatatgggttcaaagggagaagacggatctggctggaggaaaatgagctgtggctagaggaaagaaggatcgggagagagagaagagggttccagagggaagaaagagggctctggagggaggaaaataggctctggagggaggaagagggctctggagggagggaaagtgggctccggagagatggaagtgggctctggagggaggaagagggctctgaagggagggaaagtgggctccggagggagggaagtgggctctggagagagggaaatgggcgctggagggagggaaatgggctctggagagaaggaagtgggatctggagggagggaaaagggctctggagggagggaaatgggctctgaaggcagggaagtgggctctggagagggcgaagtgggagctggagggaggtaaatgggaactggagggagggaagtgggctctggagggagggaactgagcactggagggagggaagtgggctctggagggagggaaatggacgctggagggagagaagtgggctctggagggagggaaatgggtgctggagggagggaagtgggctctggagggagggaaatgggtgctggagggagggaagtgggctctggagggagggaagtgggctctggaaggagggaagatggctctgaagagagagaaatgggatctagtgggagggaaatgggctctggcaggagggaggaggtctctggggggaggggagaatgctctggaggaaggaaatggactttggtgggagggaaatgggccctggaaggagggaaatgcttcactcaaatgtttgttcccttggcctccttcttcttcagcaggaattacacgtgttcctggcaccggcctgccaaagcacaggctcattgtctcctcctaaacaccaggacaagcttccagaaccaagcctcgccaccataagaggcaactgagaccgtttcctagaatgaaagtgatccgtatgttaaaaatgcaataagcaagtcagcagttttattgatttttttcttcatacctccttaaccaattagtttgaaacagtgtaaaatggtctatgtgacagattgctcaacagatctcacttttttcgggagtaagacagagtctcactctgttgcccaggctggagtgcaatggcataatcatagctcactgcagcctcaaactcctgggctcaagtgatcctcccacctcagcctcttgagtagctgggactacagtcgtgaaccaccatacctggataattttttatatttttgtagagatgggggtctcacaatgttgcccaggctgaccttgaactcctggcctcaaccaatcctcctgtcaaggtgctgggattataggcgagagccactgcacccagcctgaactgactttcagacaatacctgggtgacttttgcctacctacccactcccacacgtaccccactgcacacacaagtgtgaatacacatgcacacaagtgtacacacacagattggctgggaccacccaggattcaatcctccttttggcaatagattctgaattatacttgtagtacttattctttccctatgtagctcatgtatgtcaatggattttgatgcttttccatctctgatcatggggcatgtggctctaacctaagcatatcagaatgatctcatccctctggccacaagaacgtggttcgtgggtaaggacctgacttcagttgtccaatcaggcataagctgtgggaatatgctcttctctgctaggcatgaatgaggaaccatgaggcctgagcatgaggccaggagcagtgttaagaccacaagaggctgagagtagggctgctgagagtagagtggttttcagataagttctctgattctttaacatgctcccttcagaaggtggagcttaatgcctccgccttgaatgagctggatttgatagcctgcttctaatggataagatgtggtaaaagtcatgctatgcaacttcccagacttggtcataaaaccaagagcatccacctggctctctcttactcttggatcctttgttctggagaagccagctgccatgttgtgaggaggcccataggggaagaactgagctcccctcccagaaaccctcagcaccaatctgcctgccatgtgaatgagttatcttagaagcacatctccccagttcatccagaggattgtagaatcaactgacacatcttcactgcaccctcttgggagatttagagccaggaacaccaagctaagcttctcctgcattcctaacccataataactgtgagatgccaaaagtgttttgttgtaagtaactgagtttttaggtaatttgtgacatagcagtagataatgaacacagaaacccataccaagacaaacaatcattaagttgctggatcaaccctcacctgaagttcgcttgatcctttagacttttcagttaagcaggtcaaaaaaagtttctttcttgtttaagccaatttgagttgggttttctgttatttttccttgaaggcatattggtagatatatttccaatcctttcctctggtctcagccttctaaagggagctaaaaatacagattagcttattttatttaatttcaaatccttgtttcagttgctcctgcttgtaactgtggcatttgcacgaatggaagcagatgctgttgcaatctccatgcagataattccttctctgggttaaggatgtaataaatggaaaggggaagataatttacacctgaatatataaagagtctacaggtaataacccttaaatgtatcctgtctgtatatagtggttgttattttcctgcccaaagctgccaaagagaaggagagagaaaagatgttaattcttacttgacagtgggccttgtagcattcttcaaaccaaaatgaaaaacacagagaactatgtgatggttacaggacttacacgcctgaaaacccagtgttccctttctctgtcctttggaagtagtttgttttgtttgcttgtttgtttccttgcttgtttgttttgcaatgcaccgaagagacagtaggacttccctttaagaaaaaaaaatttaaaaatgatttgtgcatttgtatgtaacaatggggaaatatcacagcaagatagcatatgactcatgttattgacaatgttcagaaggatctggaagaaagaaatgaggcttatggtagggtctggaatgcaataaatctaagttaaaaggaggtgctggataaaatacatctccaagagcctttggctgtcttccttctctgaacaaaactaagattggccaataacaattacagtacctcatgtatcaactgtggatattgtcctactgcatagacatggccatgtgaaatctatagatcgagggtctacttacacctgataagacttgtcagtaaattatatctttattattgcttctaggttcccttcctggatttttaaaacttgactgcctggattactggctctttatttaggaagaactttgaaatttacttatatgaatttcatcagagatatccttaagactcattgcatgtttcaaactaacttattttgggggatggattagggttgatgtttggatttggagtcctaagaactcaatatagatctcactttccccttaatgctaatataaccctgagaaagttattgaatctctccaaacaatagcctttcatctgtaatattaattattttgtttgtaataataaaagtagcgcacactcttatataacttactatgtttcagaccctgttcttactattttccatttcttaactcatttaatcacatcacctaatgtaattctttcatcccaaagctcagcacatattagatactgcaatgacagtatcccctttcatttagaaatgaaatattaaaaggcataattaatagacggagcacaaaattatctattgtaacatttctcacacatcttggtgatgctagtctaaaaaatatttttacacttatactctgtgaccatttttttcactctctcccacacacacaggcacgcacacacacacacacacacacacgcatgcatggtgaaagagcacgatttgtgaaaatcaatgtatcattgccttttctataatgtccatctctatccaatccacctggtgtcactggggacatcagagagaccctgtgcttcaaagacaaatgccatcttaattggacaggtctctttttaacatttaacatttcctgttggacctagcttacactagtcaatttttttttttaataaacaagggaaggaaaaaaaaaacatgatctaaaacccacatctctaagttatcagtgtttggtgcaaatgcgttgattctagcattcacgcgggtgcaatgccatacatgggtatcagccatattagacacagggctcagggctgtgtgcaacctgcatcagtgactgaatatgagtgacaacccatgcagcactgttaaactaccacctcacatcattacccacaataatagggactcaaattggtggagatgacccaagttctgcctactgagacccaagttctctgtggaaacactgaaagatgtcttgctcttgatggccagtttgatgcaaaatccctgaggaagtggaatgcaacgtgctaccttctcttcaaattaaacccaggctccaaagccacgtggtgaacccgctacgaggacagcatgactcaggaagaaccctgcttatggacttcgatagcagagaggcctggattcaaatatcagctgtcacctgctcttttctgaaccaatgtttttttgttaggattagatgagatgatactgatgtactctgtaaacatagaaggctttcagtaaatggcagaagaagcaagaaaagtaacaataatatttgcctctcctttcctacctcttcccttgagctccaaatttatgcagaactcaacctaataagtcagactcaccatctagaccttaaacttgcaaaaaccagaaagctgggtcatcaccacatcctctcctctccattctcaccaattgtgtagctaaatcaagaccttcactggactacagctttggactttgcttcagaagtcagaattttcttccttcttctaaatagatactgaagcaagatgaagaacacaaaaaaatgtgcttaaaaatatttagggaaattaaaagataaatgcaatgcaagactccaagatacatgtgaggctgtcaaaagcagctgagattgaggggaagccacacaagaggacgtgaaaagagatgcagcatgtggcctcaggatcaaatggtgccatctttcaggaaggacaagcagaaagatattttttaaagaaggactcaggtgagagtcctgaagtgcaaggttattcctgttttcaacaatgggaccaggtaatagagcaaactgcgcttacgctcagaacatggttggcctggcttgggacaaaatagcagagtcagccatagttgcaggaagcagtctgtctctgaggcaacagaaaacagaaaatatttttatttatttaaaaaatgtagctatataagttgtacaatatgatgttttgatatgcatacatatagtgaaattattactacagtccccaacttatgatggtttgacttactacagcttttgtcatggtgcaatagtgattggcaaccacaggttttcagatttaagcaccactggttctttgaccaaagatactctgcgctgtattttcacgtgatgggtttatgagaatgtaatcccgttgtatgtggaggatcacatgtgtacagtcaactaaatatcccatccattgtctcacgtagttacctctttgtgcatgtgtatcatgagagcaactgaaatagactctcttagcaaattttccagtttacaattcagtattcttaactatagtcctcatgctgtacattagatctctagacttaggcttcttccataaccacagctctgtaccctctgatgaacatctccccatttcctcccacctgcttgcccatggaaaccacccttctgctctctgtttctacatattcagccttttttttttttgtctttttgagacggagtctcgctctgccgcccaggctggagtgcagtggcttggtatcggctcactgcaagctctgcctcccgggttcacgctattctcttgcctcagcctcccgagtagctgggactagaggcgcccaccactgcgcccagctaattttttgtatttttagtggagacagggtttcaccgtgttagccaggatggtcttgatctcctgacctcgtgatccacctgccttggcctcccaaagtgacatattccacatataaatgaaatcatgcaacattgctctttctatgtctggcttatttcacttagcataatgtcctccagtttattcatattgctacaaatggcaggatttccattttaaggctaaataatattccactctgtgtgtgtgtgtgtgtgtcactttttttaaatccattcctctgtccatggataacttaggttgattccttatattggctattgtgaataatgctgcaatgaacatgggaggccaggtatctctgaggcagtgattttattttctttggatgtgtacccagaagtgagatacctggatcatatgatgctcctatttttgagaagccttcatactgttttgtataatgactgcaaccatctacattcccatcagcctcataatggggtacaagggttcccttttcttcacacccttgctggcattgttacctctcatcgttttgacaacagttgttctaacaggtgtgaggtgatatctcattgcagttttgatttgcaactcagaagggaaaatctgacacgtgagatctgaaaggctccccatcgcccatcccttggtcctccaaggccatgccttacctccacctggaatttctgctagtgcctagcagggaaaattaaacacatccaactatgagtcataaaaggagtggacatgattcctataaagaaatctcgaaaggaaaaattggaaaagagtcacaaaacttaacaaaatgaaaaacgctcaccagaaattatatttccatagggtaggtaagaactatgaccgaatatgtggtaatgacttaaaaaatggaaaatgattacatctatagaggaagatttttaaaaagaaacaattatctcatgtacattagcttggtgttaaaggatgtcattcaaaaatgaaaaatctagtgataaatcacacatatacatataagcaatgaggtattgcattagtctgttcttgcattgctttaaagaaatacctaagactgggtactttataaggaaaagtgatttaattggttcacagctccacaggctgtataggaagtatggcagcttctgcttctggggaaggtgcagggtgcttccaatcatggtggaaggcaaaaagggagagagatgtctcacatggccagagcaggaggaagagggtgggggtgccgcacagttttaaaaaaaacagatctcgtgataactctatacacaaacagcactagaaggatgatgctaaaccattcaggagaaccacccctcaccctccatgatccaatcaccttccaccaggccccacctccagcactggggattataattcaacatgagatttgggtggggacccagatccaaaccatatcagatatatactagcaaactattacaaactaaaattgggtgatagaagggaaaggaagagaaagaaaggaaaaacaaatatgttaattgtatcattaattatggcagggaatgaagaagagattgtctaaagaaataagaactaaaagtctcatataaagttataattgcagatgttataactagtaagaaatacaaacctttttaaatatcaggagaatcaaagcacataaaataaatgacatagtagaggactttaaaaaacaaaaaatgtaatatacaatgatatctcagaacctagaccaaatatacatcatggaaaatgtcaatgggctcaactgatctatcagaaacattttcagttgtttgtcccacaaagcaaagctggcctcagctgtagtccaaagacacattagaccatttgttcagcaaagttgaatataaagggacgtttaacggatacccaaatagatgtaaacaaaaggaagcagaggccatactcttcatatctgagaaggtagacttcaggataaaagcatgaaatgagacatacaagtgcacttcataattctaaaggggagagattcacagtgacgatacaaacattctgaatacccacgcatccgaagcaacaagaatgcagcaggaattacaggagactcgggagaaaccggcagtcatgctcgtagcaggaggccactcgccactctcgcccatgagaggccaagtggacccagaattagagtctagcagtcctcgataacataagtactaagacagactgtgctgagtcatacagaccacataccttgacaatagatcacttattttcattttcaaatgcccatgaaaacatttatagaagaacagatcacattctaggctacaaagaaactccaatacatattttaaaaatcagaaaggtgtagatattattctctgatcataatataataaaaacagaagtaaataagatcagaaaataaacaaaatcttttccacctgaaaatttaaaaaaaaaaattgctcttaggttaaaaaaaaagctcctagattaaggaaaaaacacaacccgaaatttaagaatgtctttaaaataatagtgaaaatactatatttcagaaactatgaatacagctataaaacactctgaaaaaagtaataaactcaaaaatgtatatcaatttttaaaagagagaatgaaaacaaatgaattaggcatatgacttaacaagttagaaataaaacaaaatgataagggaaaaatcaataaagataaaagcggaaattaataagataggaaactagaaatccagaaaactaaagaataaattcccaagctgtttctttagagtaaggagaagaacaataagataagaaacccaaaacaggtataagctttggcaaattttattaacttttaaaaaaaatcagctgatctgataatgcttaaactattctagggcatttttttttaaaaaggaaattatcaaagtcttttattgaaacaaatacaacaatacacccaaacctgaaagagattggaccctaaaaaattaaaaaacaaaaaaagtctaatcttattatgtacattggtgcaaaaatcatctgtgaaatttaaacaaaccacattcattagatcatcaaaaaacaataagctataaaaatggggttttatttcagaaatttaacaatggcaaaataatacaaaaatccactaaataagtcaatctgctactagatttaaggagaaaaacatatgattatctcaaacacgaacaaaaagtacttgttaaaatttaacaattcttgattatataaaggaacagcaaaagttcaataaaataagactaataaataaagatttcctagaaatgtatacaaaaggaaatggccaagttgaaagtgggggccaggaaaattcacagaaaagaaaaagtatatgattcaaacataagaaaaaaaagaaacttcgcttcactctaatgagagatcccccaaattaaagctatcttgagctgccatttttcacctattgaattggcaaaaatccaaaagtttgataacactctgctagtgagattatgggaaaacagataccatctattgctgttgggaatatgaattggtgtaacccctgtggagggcaaatcagcaccatctatcaaaattacatatgtatataccctttgacccatcaattatacatttgggaatttatcctccagttccacttgcacacgtgtgaaatgatgtctgtgcaaggttattcattagtgttgcttgtaagagcaaaaatgccaaacaacctaaatgtccatctagaggaaactggttaaataaattatggtacatccatacactataataccacgaagctattaaaaacatgaggacactttccatatatggatatggaaagattgccacaacataccatgaagttaaaacaaataaacaaaagcaatgcgtcaaacagcatgtacgttgagatgccttttgtgtaaaaggaaaaaaaatatgtatttgtgttaggttgcaagcaattttgttgtcttaagaaataatccttcaaatgttgactccaacccatttttttctggttgatcacccactgttggttcctccaacttgcaccccgctctgaccatacaacctatgttctagttacatggagccatttgacagtctctggatatctttgtgtatattgtttcttctgcctaaagcaccaaggggcctgtgtctgccccatgatccagttccaatagcacctctgcactgggcacagagtgagtggctcccttctccatagtcacgtgcacattcttcgtttttggattgtactgagattctttgctcagatatgtaactccccacaaaagaccttcagaaacccaggaccatggttcatgtattttactttcctatgtgtccccatgacttttccagcccagatcacacatgcgatcaatatgctttaaatgatgaggggttgtaaacagcctaatgtccattggtgaatgaatggatcaacaaaatatggtatagacataatggaatattattcagccacagaatggaaagaaatgctggcacatgctataatatggatgaagcttgaagacattctataaactggaataagccagacacaataggacaaatgttgcaggatcccacttctatgaggcacctacagcagtcgaattcatagagacacagtggaatggtggttgccaggggctggaggaggggaaacagggagttactgtttaatgggtacagagtttcattttgaggagatgaaaaggttttggagatggatggtgatggatggatggtgatgatgattgcctaacaatgctactgaacagtgcacttaaaaatgattaaaatggtacattttatgtgatgtatatttcatcacaataaaaagtatgacttaaatggggtacccaaagaatccttaagatcgaaagtctttacccttggttaggtgccatggctcatgcctataatccctgcactttgggcggctgaggcaggaggaggattgcttgagcccaggagtttgagaccagcctgcataacgtagcgagaccttgtctctataaaaaatacaaaaatcagcctggcatggtggcatgtgcctgttgtgccaggcactaagagactgatgtgtgaggattgcttgagcctggggaagtcgaggctgcagcagtgagctgtgatctgcaccactgcactccagcctgagtgacagaggtcctgttttttttttgtttttttttttttttttaaaaagacccacatcctctcatcttctgccaaagaaggaaaaagaaaagtctttatcctgcagaacatttttgtatcctgttcctgaacatggtaaatattgtgcattgcttccctgttcatctgtcaaaatcaattctacccttagaaagctctcctgggacttcatcgaaagctataaataagcggtcactgaggccttagtaaataggctgcaccattcatttgtcaataaatattgatgaccccctaggtggcagacaccaggtgctggggatacagaagtgaaaaagatgggcatctctcctcacctcaaggggcttacccacaatgctgaatccacagacctcttaagtcactttcaagaccctttgcctccaggtccttctgtcaaggaggtcacccactccatggccccctcctctcctctaccctctgtagcagtgttcgcataggatgctgtgcgtccgctaatgttccacagcagagaaccaattcccttaagtaaataaaacacaaaaagtttatgaaatacatcgtctgggtagaaaagcaatgctcatttatatgttttatttgtgagtgggttattgctggggtagagaagtgctattgatttttgtatgttgatcttgaatccagcaatcttgctaaactccattattagttctaaatgtgtgtgtgtgtgtgtgtttatttctttggttattctgggtagatgataatatcattagcaaatatgcccgttttatctcttccctcccaatcctgattttttttttccttcatcatgttggccatgaccttttcaataaaatttcaaaaacaaacaatgataaggcatccaaaaggatcaattttattatattgaaataaaaaaaacctgttcaaagaaaccaggaacaatgttactaaatgctagaacaagagaagagatttgccaaacctaaaacaacaggggattactgtttctagatcatgtaaggaatttctgcatatcaacaaggagaaaatgttaacctaatggaaaaatggtcagaggatatgaataagtaattcatagaagagaaaactttaacaagcacattggtgagatgcttacaatcattaatcagagaaatgcaaattaaaacaataataaatattactttatacatattagactggctgactggtaagccgaagaatgcaacatgttgaagggagtgtgggcatatacaattgtaattcactgattcagggaatgcgattggtacagcaattctggagaaaattgggcagcctagtcacatgtttttttcttggcttggctttttatttactttttcaattttattttactttaagttctgggaatacatgtgcagaacatgccggtttgttacataggtatatatgtgccatggtggtttgctgcacctatcaatccatcatctaggttctaagaccagcatgcattacgtatttctcctaatgcactctctgtctttgcccccaaccccctgacaggcccaagtgtgtgatgttcccctccctgtgtccatgtgttctcattgtccagctcccacttatgaatgagaacatgcagtgtttggttttctgttcctgtgttagtttgctgagaatgatggcttccagcttcatccatgtccctgcaaaggacatgaacgcattcttttttatggccgcatagtattccctggtgtatatgtgccacattttctttatccagtctatcatggatgggcatttgggttggttccaagtctttgctattgtaaatagtgctgcaaaaatttagacctaaaaccataaaaaccctagaagaaaacctaggcattaccattcaggacataggcgtgggcaaggacttcatgtccaaaacaccaaaagcaatggcaacaaaagccaaaattgacaaatgggatctaattaaactaaagagcttctgcacagcaaaagaaactaccatcagagtgaacaggcaacctacaacatgggagaaaattttcgcaacctactcatctgacaaagggctaatatccagaatctacaatgaactcaaacaaatttacaagaaaaaaacaaacaaccccatcaaaaagtgggcgaaggacatgaacagacacttctcaaaagaagacatttatgcagccaaaaaacacatgaagaaatgctcatcatcactggccatcagagaaatgcaaatcaaaaccactatgagatatcatctcacaccagttagaatggcaatcattaaaaagtcaggaaacaacaggtgctggagaggatgtggagaaataggaacacttttacactgttggtgggactgtaaactagttcaaccattgtggaagtcagtgtggcgattcctcagggatctagaactagaaataccatttgacccagccatcccattactgggtatatacccaaaggactataaatcatgctgctataaagacacatgcacacgtatgtttattgcggcactattcacaatagcaaagacttggaaccaacccaaatgtccaacaatgatagactggattaagaaaatgtggcacatatacaccatggaatactatgcagccataaaaaatgatgagttcatgtcctttgtagggacatggatgaaattggaaaccatcattctcagtaaactatcgcaagaacaaaaaaccaaacaccgcatattctcactcataggtgggaattgaacaatgagatcacttggacacaggaaggggaatatcacactctggggactgtggtggggtcaggggaggggggagggatagcattgggagatatacctaatgctagatgacacgttagtgggtgcagcacaccagcatggcacatgtatacatatgtaactaacctgcacaatgtgcacatgtaccctaaaacttagagtataataaaaaaaaaaattaaaaaaaaaaaaaaaattcgtgtgcatgtgtctttatagtagaatgattatatagtagaatgatttataatcctttgggtatataaccagtaatgggattgctgggtcaaatggtatttctggttctagatccttgaggaattccacaatggttgaactaatttacactcccaccaacagtgtaaaagtgttcctatttctccacagccttgccagcatctgttgtttcctgactttgtaataatctccaatgtgactggcgtgagatggcacgtgctcctgtgcttctatcccccacgtttccacacatggcccttagtggacacatagtgagaagttgatggtagcatggtttgacgtgccaaatagttggaggcagttgggttgtccattattggtgtgtggacagacaaaataccgtggttgcaagccatgggtcagatgcagcaattgaaaaaaaaaaattctagacgtacagataccaaactggatgggtcttgaaaacatagtgccgagtgagagaaagtcaacaaaaggttataatgtctcaaccaatactgtttacataaaatcaagtttcacgcatacaaatcaattgtacacattttgcaagaacacatgtagacacaaaaagcaagtataagtcaaacatatcaaaacggttgcctattgggaaaggaaaaggggataaagtgaatgaataaatacaacaaaagcggaccctcgtacagagtgatggtggcaatgccccatgacaaaagagtgagattcttttcgtaaaaaaagaagaaaaactaaaaagacctctgctgagagaacaagggcttccagagagaaagaatagtagtaatcagtgtctcccatgcaagcactaaccaggcctgaccctacttagcttctgagatcaggtgtgttcagggtagacacaacccgctgtctcaagagttgcatggggcttctagctcagccaaagcaccatcacaagatgttcgacactgcaagaagcccacgaggagcggcaccaaccacacaatatggggctacagtgaactccaagggaaggcaagactgggaagaaagacaagcctttttacctgcttcccacctggggcagaaaatgaggtggtggcacccaagagggaagagggataggaggaggatggggagtatctcgttaatctcaccacccactgccttccttgtgctatttcgtgcacaaggaggggcgtcttgtctacatatctggccaggctccaagccctctgttgccagtgagatacgtaagtgtgcaggaggagcagacctggggagcggagagaccaaccctgtattcatcctatggagggagtacctccttctctaagctctgatttatagaagataaataattggcctcagcaggcagtcaggcaggaacacacctcgctttccctgggttgcttctcttgaatatatcatttgatgttgcagcagaattggggttgcacccccatgttaaccgatgccctccagaaagccaggggcagcgagaggccagccatggtggaagcggccttttatgagtgtgtgtcaagaaagcctgtggtgtagcgagctagactgttagagattacatattgacctggctccctgaatttattctctgctggttgtggattgttcacaccagtcccttggaaagtctgccaccctgcagctctcacgatgctgttagggacggggagtccacggggtttacctgtgtctctgggctatctggaatacaggaactggaaggaaaaacacatttggtaaaaatgtagtgcctgcagagggtgggtttgagtggatcctatggattgagctgggagccaggggctggtcatcaattcagaataagacctgtctgaacacagtggaactctagagtgatctgcagtataatttagggcagttctgctcatgactcccaggcctgggggttggaagtgggcctgagaggagcaagcttggtgcccatagctaagtgattagacattatccttgagcactgactcctgcttaggaggtcagcactgctctcccacctgtgtgacggccgggaaggaggcggcacggtgggtctgtaaggtggaggcccacggcttctgccggcatcgcgggggctctgacaccagaatggcatgattcaggaaacaagtttaggagccaatcaccagtttggatgggggctgaaatccctggcttcttcaaatatacaccttcgtaaaaatttaggagattcatgcaaaaacttggaaagcaacccaaatgcaaacccactcacaagcattgagtggaaggaacatctattttaaatgtaataggcccacaattctcacccttgagtagcatcttccaggctttcaaagagcacaaggggaattttgcatggttttcttgggctgcagggcgaggagagatggtctacttctttttgattcccacgggcctccagaaggacttcttggtggtcccagaaatgtcatcgggcgaccaccacagttccacagggagggaggtgaacgaccagggctccttattccatagatgaatgaacgaaaaactggtcttgcaaacctgtgctagcgtgcatttgtgataactgcctgcagctgagacacaagcctgtatctttgctttgtggtattcttttatttatttatttattttgagacagggtctcgctccattgcccgggctggagtgcgatggtgagatcatagctcactgcagccttgacctccagagctcaagagatcctcccacttcagcttcccaaatagctggaatcacagggcaccactgtgcctggctatttttttattttactttttgtagaggcagggtctccctttgttgcccaggctggtcttgaattcctgggctcaaattatcctcccacctcagcctctcaaagtgcagcaattacaggtgtgagtcaccacacctggccttggagcattctcaatcatctaaagttatccctctggacaggagggtattggctgccagtctgacacccttctcctccccctggccatcccccagtctgtgtattgtgtacaactttgagacctctagtatcaagcatactccatgcagcaatgcaataattagcaggacatggcctgagcgacctgaaagaaataatgacatctccaacatgccaaccttgcacccaaggctcggctttcactcccaaagaattaaagtcaacatgtgtttgggcatcaaatcagagaaaactgtcaactctttcgatttgtcagttctgcagtactgaaatttctttctaaaaacagtatccagtttcaagtatgaaagaagggaacgtataatacagatgtttcatgaagtttgaagtagcaagagtccaaaaccatcacttttacattatcagccacctctgaagagttcaaagcatttttgtgaacattttagggcaaaatttcttgacaatagactgtgcagaaattatccttatttttgcaaaaataaatgaatgaactttagaactgataaagttctgctgattcctattcttaaaacccagcggacaaagccacgctttcaaagtagtactcataccttcccaggctgtgctggctctttcaggactagccaggcaaaggcatgcttgcaaacatcaggtgagccaagagaagggcagccttgtaaccctgtaagggtagtggcaaccagaatgttcttggtctatttagaggaggcagccacgatggcactagccaatccctgccaggcaggaatatgaacctctcaatatggccagacaatctgatttttaaggagaaaatggaaatctaataatttggcagtaaaatctgattattgaatgttggcttcttcttattatgatttttaaaatttactgtgagccaagcaaatcacatctgtgagccagacattgcccaaggaagctggcttacaaccacagtcctgagatgtcactactgatagcaatttctatctatgtttaaggaaggaagaagaagaaaaaagagactccgatttgaaaccataaatgaccacagccacatctgcctacttggaaggtgcatcgtttctctccagtctggaataatttctaagaagtatactatgacaggtctgggctggaagctctccctgtcaccatccccacacatccccagaggtctgtgccctgctacaaatgaagcccatccctctctccccgcaccttcctgaaagtttccacatgtgactgccattttccaggagagcctgggggtctagggaagggctgctgctccacgcctgtgttcatgcagttagtagaggagccaaagccacaaggagcaaaactcctgatgtgtcaataattctatataacgaggaagtgggagaaaaagaagtcacgcagactgcccagagatcttaggtagggggtttctgggctttttacaggaagtgggtctggattctagattgatctatgtatgtatgtatctatctatctatcatctatctagccatccatctatctatctatccatctatctatctatccatcatctatctatccattatctatctatctatgtattatctatcatctatctatcatctatccatccattcatctatcatctatctgtcatctatctatccatctattatctatctatctatctatctatctatctatctatctatctatctatctatctatctatctttattatcttaaaggttagcatgatcccagaagctcggaacacttgtggttatgtttagccatgcagccaatattgtccccagagagaagggcacaccccgtaagctgcttcacagtggatcatgagtcctaaaaatataagaggcatggggagtagggtgtgagatttgcagacaaaggttggtattccagaatgttgtgacctctctgcattcagccacccgatggcagggctgggggatcctccaccctggagatgccatgtaggcattacctcgtggccacagagcaaatcctggagcagctgtgagcagggcatttgctccttctctgggctgtggagatacctaagcacacacacaatcttggtggcagcagaggtgctattgagtaaatagaaatggccatggaactcttattacagcattcataggggttaaagaagctaatatgtttgtcaaacaggagggctgagtggacgtgtcctatggcctcccttggaaatggctctttctgcttcagatagtggaaggcttccagacacacagtccccacccattccttctcctggggaagtagccttaacttacacagacagcccgaaagagtctggggacttgtagctcagaacgaaggaaaatgacatcctccagcctggcttaggaacattgctgttcccaaccccgtacaggagacgcctttcttcttatcttcttctgggggattttagagccactcatcatgagtcacagtgaagaggtgagtttttcttacatctgcttagctataattaatgtatgaattgttggcattgtttttctttaaaaaaaaattagaacaactgcaaagggagagtaatgtgcccacccgtggtctgactaatgtcatctcacatatccagatcagtgtatttggttaaagcaatgtgaactgtaaatctgaataatttatcaaactattgaaccacttgtaaaataattgaagcttgagcctagttttgcataacagatttaaactgaagagcaatgtattagcaagatctcaacctctagaaatagaaatggctgtaagagggctgacagtctttatcataaaacacacatatataaagcattcataactggccactgtctttaacaatgacttggtagcatttgcagcccaccccaactggatcctagcacagaggaagggaggctgagatggtggaggaaaagggtcactgacaaaatatttgataatctcagagtttaagggtctggggctgggggagcagagacgttctttcatccatagcataggttagcttgacaattgcatacaaaccaaaggtctggcgaagaccagctggaggtatttagttggcaacggataagattgactccaccaaggcagggcacagtggctcacaatctcagcatgttgagaggctgaggagggtggatcatttgaggccaggaactcgagaacagcttggccaacatggcaaaaccccatctgtactaaaaatacaaaaattagccaggcatggcgatgcgcacctgtaatcccagctactcaggcggctgagacatgagaattccttgaacccgggaggcagaggttgcagtgagccgagattgtgacactgcactccagcctgggtgatagaaggagaccctgtctcaaaaaataaaagtaataaaataaaaaagattggctccacgagtatgagaacgggaggtgtttggttcaccttagtgtgccctgatgagacagcatctgcagtgtcaagtgtacttctgagcccacatgataaaagggacattgataaactaatgaatccagcaattaccattcgggatggagagaaacgtcaaccacattcagtgaggatcggtggagaagcacacttcctccttcattttaaaacttcattatgaaagtattgagatacatatattatagtaacaaaatttgggggaaaaacagataagcaaaagagaaagaaaaggaatcagaaatcataatctctagggagaatccttctgcacattggtctgagcagtgatttttggatataataccaaaagcacagacaacataagcaaaaatagacaagcaggactgcaccacactaaaaagcttgtatgcaacaaaggaaagaatcagtacagtgaaaaggcagcctacagagtgggagaatatatgcgtgaactttgtatctatctagtgaggagttactatctaaaacatatcagaaacacaaatctgtaaaaaaatacaaatcacccaattaaaaaatgggctacattgctgaacagacatttctcaaaagaaagacacacaaatggtcaacaggtgtatgaaaaggcactcggcatcactaatcatcagggaaatgcaaattaaaaccacggtgaaatatcgcctcgtgcctcttaggatggctattatcaaacagagaaaagataacaggtgttggcaaggatgtggggaaaaagggagcccttgtacatccctggtgggaatgaaaattggcacagctgctatgaaaaatagaatggagatttctcaaaaaataaaaaacagaattaccataagatccaataatgccacttctgggtatatgtagaatggaaaagatatcagtaactggaagagatatcttcactcttatgtttattatggcattattcacaatagccaagatatggaaacaacctaaaagtctgtcaacagatgaatggataaaggaaatgtgacacacacacacacacacacacacacacacacacacatataatggaatattattcagccttaaaaatggaaaacctgagccgagtgcagtggctcctgcctctaatcccagcactttggagggctgaaccaagtggatcacctgaggttaggagttcaaaaccagcctggccatatggtgaaaccccatcgctactaaaaatacaaaaatgagccgcccgtggtggcacacgcctgtagtcctagctactcgggaggctgaggtgggagaattgcttgaacctgggaggcagagcttgcagtgagccaagatcgtgccactgtactccagcctgggtgacagaatgagactccttctaaaaaaaaaaaaaaaaaaggaaaacctgctatttgtgacaatgtggacaaacttggtggaaattaggctaagtgaaataaacaaggcacagaaagacaaatactgcattatctcacttatatgtggagtaccaaatggtcagcctcatagaggcagggggtagaatggtatctgccgtgagttgtgggggttggggaaaacggaaagacattggtcaaagggcacagttagggaagatgaatgagttatttgggtctaatgtagcccatggtaactgtagttaacaatattgtatacttgaaatttttgaagagtatagatcttaagtgttatcaacacatacacacacacgcacacacaatggtaaatatgtgagatgatgtgtatattaactagcttgattgtggtaatcatcttacagtgtatatatattttgtgaaatatatatatagtgatatatatcaaaagtcaagttttacaagttaaatacatacaatttctatttgtcaattttatttcaataaaactgaaaattagaaataaattgagaaacaaaaaaataaataaatcacaatctcggcctggcatggtggctcacgcctgtaatcccagcactttgggaggctaaggcaggcggatcacgaggtcaggagatcgagaccatcctggctaacacggtgaaaccccgtctctattaaaaatacaaaaaattagctgggcatggtggtgggcacctgtagtcccagctacttgggaggctgaggcaggagaatggtgtgaacccgggaggtggagcttgcagtgagccaagatcgcaccactgcactccagcctgggagacagtgtgaggctccatcagaaaaaaaaaaaaaaagaaaaatcacaatcttaacagccagaggtgcatgtcatttcaaatttttccatcttgcattatatgagaagttgtttataaaatgtagatcatacaatctcaatctgtagctttaaattagcaacacatattgttattacaggtaacaatacgtatgttgaatatgcatacctaccatgtccatataaagcatgtacaaaattatttctaatggctacataccattcttcctgccctgcggtttacaaatgagcagaggccgattctgattttgatgttcataaacaatgctgatataacaataactgaaaaaactaaggaagcattctctatgctttatcttttaatcctactaaccctagaaaggagatattgttaatttctccattttatggctgaggaaaatggacttagagaatctaagtaactaacaagctgtgacattccgggcaaggatcagagctggaatttaaacccaggtctgtctgatgcttcagccaagattggtaattaccacaatctactgctgtctacacacatctattgtattttttcctgattacttcttcaggataaattcctgaaactatacttgctgggacaaaggagatcagaattttaaatctgggaaacagaaaagatggttgtgatgttcagagacgtgcaggctgatgacatggctgaagatttggttccttccggctcacttaccggcccgactggaaccgagaggtagaccatgggtcacatgtgctccaaaacggaacaacctgccaggtgaggtggctcacgcctgtaatcccagcactttgggaggccaagccaggaggttcacctgaggtcaggagttggagaccagcctggccagcatggcgaaaccccctctctactaaaaatacaacaagtagctgggtgtgatggtgggcacctgtaatcccagctactcaggaggctgaggcacaagaattgcttgaactcaggaggcgcacgttgcagtaagttgagattacaccactgcactacagcctggggcaacagagtgagacctggtctcaaaaaaaacaaaacccaaaatgttcacaaggaacagccttccttgtgagtcagagaacatcccctccccaaaagcattccagccaagtatgcaggggaccctggcagagatgtcagcaccaggaaggagactgaagacccagtgccctctccaattctccggttctttcagaccgcagcccatccggccgtctggtgctataattatgacataaaatttggggagtctttatttatatgccatacttactaaatcagtgtttcaaaactatttctataaaagaaaagtcatctttgatctctaaaaatgtaggggggtaggtggtggaggaggaaggcatgaacccatataaggaaatacattcaactggagcaaaatgcaaaaacggcctctgtttcggattaggagcctttgttccctggcaatggctgtcctccaccttgccggagtcttctgtccaggcttgttttatttgtgagagccagagccacatgttattataacttaaaatgcatatccacctcaagaaagctgtgacgtatctaccgaaagagacacagactgcctagcctaagttggcctttttttccccttcttagcctaagttggccttttcttcccttctattctaatagaccttgttctttttttttttctttttgtcactcaaaatgagtgtctgatgtactagcataaattgttaaaagcagttttaggtaaaggaagagagagtaaagtggagattttttcacaaaagccaacctcaatttatgtcaaagagggttaaaagaccttgggattaaagcaataaacttgctgctgtcaaagctaaaacccgctaacaatttagtgccaaacgcatgttgttcaatatcatttcatattatattatgtcacaaagagctgatggttctgcatcaccctgacaaggctgatttactctgaagaattcatcgacattttgcacagtcaaactgacttcattttgtttggatggacggtgggaaatgtctctgtactcgagttcgaatattagtctgaaaatctattgtggattaaagattcaggaggactgttggtctacagctttgccaagtaaggtctttgaaaggtagctatagacttttgaatgccttcattggcgaagtgcttagaccaaagactaataaaaatcaacagacgttaagttagatttttgcggcaccccttaaagtatgtgaactgttagccaactctccggaaaaagaaagttgtaggagcagattttccccagactagatatcaattatttataaatttctcaaaagatattaatcaccctattttcttaattatgtgcacccataattcccttttcccattttattttttactggaacaaactcatagttgtaattgtggacattaagatgtcttgtcgttcaaaggtgatggggcagtgggtatgtaggacttcaagtcagggagacaagattttttcctgggacgattacagaaggaatagtggctctgaaattatatgacctctgccttgaagagctagatacaaatgaggtcattttttaaaatcaaatgattgaatatactatacacagtaaaataatatttacataaatgtggatcatttatgaaatatgtatctatatttatatacttaagtctgaaagatgattcaacaaaatattgagtggttatttctgggagatgatattagaggcaaaagttgatttttttttcttttcaacctacagatattttcaaattttcttttattaaaaaaagaaaaaagatataaaattatactgaaggaattgattgtccaaagctattccacagtgaatgtctttgtaaagtgtgatccaatggtttaaatcagaagaaagaaattcctaatctaaaagggttctacaattgttgttttcaaacattgctttcttcagaatgtggcccttccatggtcagccctctgccctgcaggaaggaaaatgagtaagatgttgttgcttctacatcgagtggctgggattctaagcccaatatcctcagggcgctgtgtgcattccactgaagatgtgattgacaagctaggaggaggccagcctccaccacccaaagggtgctgaaaggcctagacggggttccaaacaactccaggtggcaggatcaagtgactccagaaaaggaaactctgtgtgtgtgtgtgtgtgtgtatgtgatttgatttcttctacaaggatgaaggagatgcttctcagacttgcctgacttctctctccagggcctcaaaggcaccatccaccttcactttctgatgggcccccagtgccacctacacctcacctgagcctcatacagcttcccctacaggccaaggggacacattgccaaggctgccttttttttttttttgaggtaagtctcactttgtcacctaggctggagtgcagcggcaccatctccgctcactgcaacctccacctcctgggttcaaacgattctcctgcctcagcctcccgagtagctgagattacagtcatgcaccaccatgcccagctaatttttgtatttttagtagagacagggtttcaccatgttggccaggctggtctcaaactcctgacctcagttgatctgcccacctcggcctcccaaagtgctgggattacaggtgtgagtcactgcacctggccccaaggctaccttctaacagaggatgttcacttcctaaaacattaagtcaataagaaagtgccatgcgtacagaacaccacgacacctctgcctaacacagtgtgtggcctcagtttccttctcagtgtgattggcactaacacacgtgtcaggtctgtcctgcagggttaatgtggaacccagctgcataaggcatagccaatgaactgaatagacaccttccagtgcctaggtagcagtttgggggtggcacagtggggtgagacgttaccgcacaccccaggtgctccctatctagggatgaactgaaaccaaggcccagatgtggtaagggccaaaagaagggcagagtaagtgtgctgcacacccagtacttttctcagggcacaggaggggtgttggtggaggaagtcgcagtggagctgtgttttggaggacaagaaggcaattgcctaaggaacactttgagatacaagacagttatggttaggagacaattcccaatagtaacccctaatgagataagagtgagtggagagcttggctttcctgtttatttctcatgcagcccttgcagaaggcagaataatcaacccatgtggatgcagacattccccttaagccatccccagccctccctctccctccttttgtcccaagacagacaacccctaaagcatgagctcatccccttttgcacactggatcctgttccttggactgtgctcctgttctaggttcctctgtccccaaagagcttctaaccatggccatgcctctgccacccttggcttctcatcccgacatccaggaattgtcctgcccactttggaccagccctgcttctggcaagcacctgaggctctcagcggcccactgggcagagacctgggcgaggacagtgccactgagggccaggaagttttgtaggatatacacccagtcatcctcactgaccaatcactcttgcctggctctctggtaacacagagctcccagaccagaaacttccctccaggagtaactgcgctggtatggaaagtggaaaagcaatagcaacaattctataacccagagcacaatgggctgatgacaagggctggaacgcacacaagagagtgtcagggtcagggtcggaggaaggtactcagatgaggagacacctggcctgtgtctccaacagggacacataaccccaagtttggccgggcgtggtggctcacacctgtaatcaatcccagtactttgggaggccaaggtgggcggatcacctgaggtcaggagttcgagaccagcctggccaacatggtgaaaccctgtctctactaaaaacacaaaaaattagctaggcgtggtggcgggcacctctaatcccagctactcaggaggctgaggcaggagaatttcttgaacccaagaggcggaggttgcagtgagctgagatcgtgccattgcactccagcctggatgacaagagtgaaactccatctcaaaaaaacaaacaaacaaacaacaacaaacccgagttcaaggggaaagcaatggaggaactgtagagaaacttgatgggatgagggtgttgggaggacaggagttggaactgaaaatatagggttggggcccatatagcttaatattttctaagaagtcttaaccttatcttctagggaccccgagttgcagaggggatttagacagagataaggatacggttagtttgttgtgttgaaaagttgcatctcattgtagttttgcttttcattttcctaacaaggattggtgttaagcaccttttcctggccttcactcgcatttttgtatcttctttggaggaacatctctgcagatcctttgcccatttttaaatattgtgatttatctttgtattgtagagttgacatggttctttatatattttgtgtaatagtctcttatcaaatatatgattacaaatattctattcatctatcatctgaactattgaagcctcctcctgtaggcctccttcctccttttcttgctcccctacaatctagtagccagagagatttttttaacataaatcataacataaacatagccctagttctccatgcaatatgattttttcaaaatgtttcttcgaccgagtcactctcctgcttcaaaaaatagatttaagaaaataaaccccttttcttgcttcccactgctgttgggatgatgtccaggacccttcccttggactctaaaggccctaaatgatttgttcttttttgcaacgccacttcaattctcaccactctgcaccatcgccatcccccagcacagtgatttgatttcagatccccaagcttccctgcatcccatcctctttgcattccagaagactctctcacccctcttccctggccaatttcctttcacctgtatcaggttaaatgctgcttctcttgggagaacatcactgaccctttcaacctaaatcaagtcccctttagacaaggacagtgctcatcaaactcatcacactttgattggaggaattattgattgatggtccttagactaaaagtgggagaaggacggggcccatctgctctgtgtctgtagaggaaagtgccagaatgaaggtccccttcggccaccaggggcccaatggagaagctgtgtccacaaggtctctctctgagactgccgtcttcccaggtgaaggcgtacccgataaagctcttatcaaaagagcattcactatatttctgtcccactctgtataggctgctcactctttctcccaacagatttggaaatcacaaaatttatgaaatttcacccaagtctttgctgacttttggtgctgaagaaagtgccatcaaaatcacccccacaattcattagtaattcatcagccttttctccctcaccctaagggacaaagaaccatgtttcttagagcttgggagagccccactgcctttgttgtttgtgtctgtgtgttttaagttttattttaagaatgattttctaagaggcctttgaagtataaagctgccgcctttgctaaacctaatgttcttgtaaattttcaccttggatctgacagtgaatcagagacagagctggaaagggcttcagtgaaggcagtgattgggaaataggtccagagggtgggcaccttgtttttgctgccttttcacaggtcacttggaaggagtactctagttgtctctttttgcttttagaaacttcccttcccaacattcttggctgccccaaacagccatgccctctgatggctcagaggtggatcatgtgacctatacttaagccaaccagcccttcatgtccattagtcctcggtgattagtttggaattagacatttgacccaagtacagccaccaatcacatgcaaacaggttgtgggaatgctgggtgagaagctctcattttcccctaagctgtaggtgagggtgggtgcagatgccagagctgctgcaactatcctatgaatagagtgcagagatggttagggcttggtctgagaaccctgccccagtcctaatgcaggggggcctagaggcagcatccctgctgccattattagttatgcaaggtggtgaatttcttttttgttgttgttgttgttttatttttgttttgagatggagtctcactgtctcacaggctggagtgcagtagtgccatcttggctcactgcaacctccgcctcctggattcaatcgattctcctgcttcagcctcttgagtagatgggattacaggtgcctgccatgcctggctaatttttgtatttttagcacagatggggtttcactatgttggccaggctggtctcgaactcctgaactcaagtgatccacccacctcggcctcccaaagtgctgggattacaggcgtgagccaccgtgcccggccgtgaatttctttatcctaggttctggccactttcacagacagtgtccttttaacgcactctaccccgtgtttctatgcctgctctccggatggaactcggctgccattcgtccatgcagctgtgtgcacgtgaagggccctctaccaggacggcacggtcctcaggcctgagtatcctgcggcctgctgtggtctcactgaccctcctcacccaggacaacctccagctccctgtagccacctgtctctctcaactgggcagctcttgcattttgagtgggttgagtcatcctcctgtggagctttcacaggtgctgcgaggagccaagtagtctacctgtctggccccaccactgtgacaaccttcacacacatgtttgatgggaccatggcatttagagcctgcatccaccttctcacccttatcttccagcgtcctgccttccttcacaggacagaaggagagttggcagccccaggctcactctatcccatggccgtccctcctgaggcttcacttctgcaaggtaggagcctggagatgctgccctagccaggtaaaaggaagacagagacactcatctacatgttatcatagtcccttccccgaggctgggaaaggaggattttattctccaggcaacgtccactggcaacgctgcccaggcagctggtccctagccccactggaggcattccaaccacttaacacagtttttcaatttccactgtttttgcacatacatttccatccctgggatggattgccacggggctttcctctccaaaattctgatggatggcatttttaccctgcaatgatccctaagttaaagtgatattcaccaatatttattacgtggtaatggcatggagcaccagatcaaaaattcatggcaagcacacactgcaacactctccctgaatgctctcagagcagatatatgattctatggatatgcacatctgtatgtaagtagtgtacgcatgcgtgtgcactcatatacacacacacacagcctgggccacatcttgtctttcaactccggtggcactacagtaacaaaccggtctagaagcaggcctgagagacaggatttctcaaccaagagatgggcagatgtgagtttaaaggaagagccagtagcaggaggttcagtttctcccactctaccaccagctgggagttaattcatcagttctgggactcattcaaacagcatggcatgacactggtggaaagcaaacacatcctctgaatgcctgctgtattctgcagaggagagcagggagctgagcctggtatccggagctcaaggcctgatagcccggactcacatgaaggccagaggatgagctcccagaactccacgagtcttggcctaatgtcttttagccaagagcatttggtgaaacaaaaaagaccctttgaggccaagcgtggtggctcatgtctgtaatcccagcactttgggggggccaaggcaggggatcgctcgaggcagggagttcaaaaccagcctgggaaacatggcaagatcctgtctctaccaataatttaaaaattagcctggtgtggtggcatgtgcctgtggttccagctactcaggcaactgggatgggaagataagatcacttaagcccaagcattcaagcctgcaatgagctatgattttgccactgcactccagcctgggcgataaagaaaggccctgtctctaaataagaataataagacccttcacaagcctcaacaaagatagatccaagatcctggctcctcactccacaggtagccagagaagaccctgccatctcctgagcctaccctaacctctcccactaggtttgatcctctctcctttgtgtcctgacccacatgactgcctgcacccatccccaccttggtaacattccccaggaaatcattttagtgcctctttcctgcccttatgcctctaatctattttgattttctgttactgtgcctaggaatgccaatgcattgttgaacagaaggggctaggcatcagggacagcatcccacctctctggccatcttttagccattaaaatttgccatcacctattgttgacctgccgccgagctccatggaaagaacacaagatacgtattgcaatggtgtgaaaacatttggctccaattttttctatatatatataaatttttttctcccttttcttcctccttttgacccacagaaaagagaaccctaagtccccacactctgtcacttcataaatctctctctaattgcacccttggggtctctcttggccagtctttcagaagaagggctacctggccttccaaggattggtttatcaccttagttgctttttgccaggttttctccatcacaagagtcttttctttaatgacctgagctatttacaataaggaaataacgtggtcataatcagagctggggtgattttgctttatacaagcctctctctctctctctctctctctctctctctctatatatatatatatatatatatatacacacacatatacacacacacacacacacatatgtatatacacacacatatatgtatatatgtatatatgtgtgtatatatgcatatatatgtatatatggtgtgtgtatatatgtatgttgtgtgtgtgtgtgtgtgtatgtataaaaggcatctatctgcccttctccacctcctgaaatattcctcaactgagatttccatcaaacccaccaatgacctaggagtatctaggtgggtctccttgcactgttgaccatggtgagttcacttggaaagccctgctctagggacaatgtgcatcctattctgtgcccccagcatgcatatgcccaaatcccccaagaatagaagaaagacaatgcattgctatttccgtctccaaaattaccgtggatggcattgataagtctgaaggagggagaaaaggaagaatagaaggatagggcgttagcgagagggcaaggagaacaaaggaaggcattgttggacaataagcagcaggtgaacaggaacactttgtccagagggcctccacagtggggagggagcaggtaggaagacagcggtacttagaatcttagccagagttcaaattatagggcactgtttcattccccaaatcaggtatttagaaacacagatagagggaatccctttccaggcttccattgtctcccataaaagcatgctggatgggcatagagagaaaaaatgaagcagaaactcacaaaattagactcaacatgaatttgatggggtgtagaaacgtcctgcaatcagaggagacatgctcccacctttaaacatgagagggctgggctggcgttgctgcctcaaatataggatgaacttgaacttcagataagcaatgaacaattttttataagtataaagtatgtccaaatatttcatggggcacacatataacaaaaagtattggttgtttatctaaaattccattttaatctggcttttttttttccttttgctaaatcttgccagatttagatcaggcaaaatttccaaagcttctttcagtttttccattctctgttgtgtgtccccaccccaaggggagagccactggggcctcagaagaggcaggggacacaagaagataagaagagttctaggatcagggcagcaaattacggctgaggctacacgcatagggaaggggttgttgaaacaggcaaaaccaagtgtgccaagatttgctttaaaaagaaaaaaaaaaaaaccacaatggctcacacaatggctcatcagcagtgcggctgacccagtgagtccagacaccacaacctacggcaaaatctgaactgtggaactgtcacggagcaactgggaaaacatgaattcatagttaaaccgataaaattctgtgtaatctgtctttgtaaccccagaaactgaaacttatgcttaaaaaaagactaatattctttttttttttttttgtctaaaccactaattattttacctggaggaaattcctctattattttcactgctggaaaatcacagggtggttagtactgctagtacctgtcacagacagacgtaaacaatgcgatccaataaaaccttatatagcacattgcacacaatagtggcttgccagactcacccagtaaaacaaaacatcaaagcagaaaaaattaaccaaaaatagcttgcacggggaaacgtggtaagcgagtttgaagactgaattcctaatatccctggacaacagacttcactgatacgagatagtggaaggaaagggtcccggggaggggctgacaatgagctgtcaagatctgaccgcaactcgcttctcctctgcacctgggttcatagcatagtcaggccactaatagtcctgcatgtcggttagcacttacagtttgcaaattgtttttacatgcactggctcattgggtcttcccccaatgctgtacaatcagataaaatcctgccattctccaggaactgactcaaccaaaaatgctcaccacaaaaatgctcagcctagttggggaggtacccatttatcaaattgccgtactaatgaaaatccaattatagacagagataaattaaaggacttggatctgactttgcgcagggtgataggggaggctccctggaaaaggtgatgttagacctgagctcaaaggcaaataggatgggggaagcagcaacttccagtgaaagggcagagtcctgagcagggaaagcctgaaggtatgcagagagagtgaaataggcaactgtgggggtggaggtgggcagaggaagagaggagaagagaggggcaaggcagagaaggaggatgagcaggtgccagaccatccagggccccagaggccattcccagggtttgggaagccacggaagggtgtttagcaaggaggtgagagtttcggatctcctttgcagtgtgccttctccacttcacagctatgatccagggtccggagccctgccttccttctaggaatttataagtttcctaaattatcaagagaaagtttggggctgggtgcagtggctcgtgcgtgtaatcccagcactttgggaggccgaggcgggcggagcacctgaggtcacgagtttgagacaaacctggcccacatggcaaaaccctgtctctattaaaaatacaaaaatcagctgggcatggcagcgggcgcctgtaatcccagctacttgggaggctgaggcaggaaaatcacttgaacccgggaggcagaggttgcagtgagccaagattgcaccactgcacttcagtctgggcaacagagaaagactgtctcaaaaaaaaaaaaaaaaaaaaaaagagagtttgataacaaagagtgagtcagatgtcacttaacagagcctcatttggaatttggaagtgcacccctcctatgagtggccaacgggcaaagctaactgcagtggaagaaaagtccttagtggatgccaacttcttgaatctagtgggaagacaatcaatgtttctcctcaggatggcacagctttgacctttgctcaggtggacactagagggcctcttggtcattagttatgggtgagaatcatgccggaggaggttaggctgcctctgcccttcattcttggtttcctggaggtctggtgtcattgttgcaagccccatccacctttctttctcttgttacactcattcatctctgtacatctcctctatcttaagaattctttcaagtttggaaagtgagaaacttttctttatttataagcattcttccaaatgcctaagttcatctttctgaggcctaattttggattatccatagctagaactaactttctttctttcttttttctttttctttctttctttctcttccctccttccctctttcctttctttttctttcttccttccttccttctttccttccttccttcattccttccttcgtttgtttgtttctttctttctctctctctctttctctttctttcttcttcttcttctttttttttttttttttttgagacaggatccagctctgttgcccaggctggagtgcagcagtgtgataatagctcactcactgaagcctcaaactcctggactcaagcgatccttctccctcggcctcccaaagtgctgggactacaggcatgcatcactatgcccagctaattttaaatttttttttgtagagacaaggtcacattctgttgcccatgctggtcttgaactctgagctcatacaatcctcccacctcagtcttccaaagtgctgttattacaggtgtgagtcaccacatccagccaaatgttttcttttttctttgtactctgctagtatcattctttttctgaggcatcgaatataaaatgcccacttgactaaatgggcaaagggcagggcttagcaggaaataactttattccaacacaaagaggttttccatttgcaaagatcacgctggaggcatcaaagagaatggtggcatgacggtaaatcaactggtaattactgaatagctctggtggaaagagatggtaacttggactgggatgattgtgttgtacatggaaagaagaaatcagattccatacagattatgaaataagatattgagactaagccatattttggagatagtgaccatgaagagagaggaggacctaacaattctgtttgacatttggatgaggcagggttgtcttcactggaaatggaaaactagagatgagagttacttttgagaataacgaccaccagtttgattttgaacacactgagattgagacgactttgaattatttaagaaaagatggaaactagccagagatattgatccagtgctctgcaaagaggcatctactgcagataaaaatatggaagttatagatatatgcatggtaggaggaataagttcaagcaatctatcgtatagcatggtgaatctagcaattaacaatgtgttgtatatttgaaaattcctaagacagtagattttcagtgttcttaccacaacaaataataagtatgtgaagaaatgcataccttaattagcttgacttagccatcctgtaatatatatgtattttaaaaaatcatgctgtatgctacaaatatataagattttaatttaccaattaaaataaataattatggccagccatagtggctcacacctttaatcccagcactttgggaggctgaggcaggcggatcacgaggtcaagagatcgagagcatcttggccaacatggtgaaaccccgtctccactaaaaatacaaaaattagctgggtgtggtggcgcaatgcctgtagtcccagctactcaggaggctgaggccgaagaagtgctcgatccttgtaggaggttgcagtgagccgagatcgcgcctctgcactccagcctggtgacagagcaagactctgtctcaaaataataaaataaaataaaataattataataaatacaattaaaaacggaaaataatggtaagaaaaacaataaaggagattacccaaggaaaattaaaaggggtagggccatacctcagacagatctcttatttaatggttgaatcaatgagtctgcagaagactgaaaggggatgctaggatggtaggaagagaaccaagggagtgagtcatgacagaatctaagggaacagatggttccagtgaagaagcaggcgtcatcagtgccctgagctgctaaggggcaagagggtaaagaatttaacacttgttggatttagggcatgaagggtattggtgaactaatgtctctcttggtggagggatgtgggaggaagctaattgcatgaatgtcatcgcaaatgggaggtgaggaagcaggaacaagagaacacagacagtgcaggttattctcactgtggcagacaccattcttgccaccagcttggctgtggcagggagagaacagcagggcagcagcaggagggagatgtggcatccagggaggtgtgcttattggcttgcttgcctatttgtttgaagacaggaattttgaggatgttcgtggtaagcagaaaggcccctgcagggggaagagtacttgtgtggataaaaaggggaagggacattttatagatcatgttgggtttttgttaagttaggaggggtgggacctaaagcttaggtggtgaccatggggaagagaattcaccccagagaaggtgaggagcatcctccatcccatagttgagtagggaggaggacgcagatctgcacaggtggaggaggcttggggcatggcaccaggaagctttgtctaagataatcacggtaatgtaagaggacatgtcgtgtgctgagtggtggcagtcaaacatttgaaaggaagagatacatttcagaataagtctataagcaagaaagcaaattaatttggtaagtgcagcagaagagcctcgcaggtttgagagatcttctagggttggtgactatggatttaggatagaaatggaggagcttgtggtccaggagtgggatgttgaattggcctctgtctgtttgcccaaagcatttgtacattcctgacccatgtaaactttatcagtctaaataagatgatactcttggaaatggttacatgtagttcaccctatttccccaactagtatgcacactctttgaaaacctaacttctctgccacttgtcccacccatcttcaactatcttcctacagtttcaggcaaagactacatcgtagcatttttgtaaataaggtaaagtttgtgaaagcattacaaaaacttggcagtgggcaagataaaactgagtacttaaattattactgcatcaatccggaagcctaatatggatgatattaacaacttactttttgagagttttaattatttttcagattgcaaattccattctcacacagtattttatttgttccgaaaatcactaatgaggtgggtatttttttattttatttttatggaagctcactctgtcatccaggctatagtgcagtggcaggatcccgtctcactgcaacctccacctccttggttcaagcaattctcctgcctcagccccccaaatagctgggaccacaggcccatgcctccacacccagctaatttttgtatttttagtggagatggggtttcaccatgttgccaggctggtctaaaactcctggcctaaggtgatctgaggtggatatttttgaccccattttcagtccaggagcctgggtggctagttgaaggtcagagaataaagatgtgtcaaaactgaaggtgcaatccaggtcttgggacatcaaggaggaagctggtttcatcagtgcccagagatgccaaaacgtgagaatattcaatacggattaatgatcctcaaagctgacaatggaagatgaatctatagactctttttctttgtggataccaagcatagttttcaaatatccaggccaactgtcactacactacactacacctggccacacctccaagactgagagatgcaaagaccgtagaaaagagtcatcagcagtttcctcacctcctgcaagaactgctgtggattgtatttgtggaaagttgtttcttcatctaatgctttgggacaacggtgatagaataatagccctgcctgggggaaaggacattttcctggatgtgtagatgccggacccccagggtcgatgcctggccactgtctatgaatctaaagctaatctcagagagcttgaggctggtcagagaaacccagtaaaggcatcatttttccatgagctttacgctaaatgaattgtccacataagactccccttacatctcccatgtgcattaattttttgccaatattaacaaagaaatgtccaaacaaaatgccaacgacttgacaggtctatttttcagagataaattggaagaaggtatccacttagaaattgggacattgatattgaaaggggaatgtggatcttgtttatcttcaaaagaattctttaaaaaaaaaacattgcaaatccagtaatccacatcacactttagaagatgtccttgagtctcagagggaaattagttgtatgcattctaagctaggatatggctgggtttattccatttcttaaatgtctaaaaaatatcaggaggatctattaagctaaaggacccatgttaatgcaacattagggaacttgattacagcccaacactcaggaaaatcattttcagcttcgcacatgctacattgcacatgtaatattttctgtttgatgttatttgtcatttattaaatgtatatattaatatgaagtgttccatttcctggctatggggtgtttaaaaagttcaatctcacttcacactcacaccgaagaaatctcatttccctacccctttcctgagccaagattcctctgccttgctcaggaaatagaatgctcattctgtttattgagtgcttagtgtgctctgggcattaggctatgaaatacgtcaggaagaccataagcataactgaatagtacacagcctctgcccttccgaggcttacattcagtggggagaaggagacacatagacacataaatacagcagctgtcgtatttaactgattaaatacaacatgccaaatacaataatgtaggcataccaaatgcatcaaggaataccaagaaaaaatgtattcactctggtggggggttggagaagacttaggcactagacagcatctaagctgggcatatggagtagtcattctggttttgctagaaagagaaaaatataaaaaactattgtgaacatttttttttaagtgacagattgtcaaagtgagtttcttatggatttgaggtctcttgaggagtcaactagatacacatcaaaacaccaaggtgtctgggggactaactacactgtatgaaaaataggcaatggctataaagtaaaatctgctccacaactcctgatactgtctttggagaatgactaaaaggtctaaagagaagagagtgaaaagattcataacaaggtttcgttctgaaatagttattaacctagagtgaacccccttacacccatccccctgagtcaccttcacccaagagtacacagtgaagtcaggacctcagggcactttcaccaaggatatggaaaggctacccaatgaataaagttttttgtttgtttgtttgtttgtttgttttgagacagagtctcgctctgtctccccaggctggagtgcagtggcgtgatctcagctcactgcaagctccacctccggggttcacgccattctcctgcctcagcctcctgggtagctgggactacagatgcccaccaccacggccggctaatttttgtatttttagtagagacggggtttccccgtgttagccaggatggtctcgatctcctgacctcgtgatccgcccgcctcagcctctgaaagtgctgggattacaggcgtgagccaccacacctggcccctcaatgaataaagtttaaggagatggtagttaacaaaaaataaagtttccttttgattaggtcacaactcatgcttacttaacataccaatgacatcaaaccatgtaaaacttgtattgacatttaaaaacatggcataatataccatgctaaggtttaactattttcctgtagtgttcattattcatctatccaggcttttctttctacttataaacaatgtttccataaacatatttggttacatctccttgtgatgatttctactgctttgctatgataaatcctggaaatgtaatcgcagggaaaagttttcttttccaaattggctgactcctttgaaatatttaaatagtctttttttttctattagatggcttgaattttctcattgatttataagcattttcatgtatttttgacagttgttctcgtcacatttgaggcaaatattttctcctagtgtcacctttagattaagatgtttcctacctacatactgtgttttttaaaactttggcaacttcaaatttatccatcttttgttttctacttttaaaaataattattaaaataagactctataattcttttgatatgcttaaagttttattttgtgtgtttgtgtgtgtgtgtttaggcacttcatatgtcttaaattcattatgtaaattttgtaaattagatatctaacatatcagactccccatttttaaacacccctttcaatctccacagtgatggttaatattgagtgtcaagttgattggattgaaggatgcaaagtatcgttcctgtgtgtgtccttgagggtgttgccaaaggaaattaacatttgagtcagtggactgggagaagtacatccaccctcaatctgggtgcacaccatctaatctgctgccagtgccgctagggtaaaagcagctggagggacgtggaaggacttgactggctgagtcttctggcctccatctttctccgtgctggatgcttcctgccctcgaacatcggactccaagttcttcaacttttggactcttggattcacaccagaggtttgccaggggatctcgggccttcagccatagactgatggctgcactgtcggcttccctacttttgaggttttgggactcggactggcttccttgctgctcagcttgcagacagcctattgtgggacttcactctgtgattgtgtgagtcaatttcctaataaactcccctttatatattcatctatcctattaatcctgtccctctggagaaccctgactaatgcatccactaatttcaaatatcagtgtatctcatgataacttcaatatacaggagtgtctatttctgaaattttgagtctatttcatctatttgtatattcttaagtaacaccacacttctttaatgtttaaagtttcataaatatgatatcagatggtgaaagtccatccctttgatcacttttttcaaactttcatgtctgttaatgagcagttatcttccacttacatttcagaatttatttgttgatttgcataataatatcattgtcattttgtttggggttacattaaattttcagataattttggagagaggcaacattttaaaaatagaaactcccatccaaaaatagtaagtaaccctccatttatattcaagtcaatttattaaaatgttagatgtttctataaaggtttattatattatcattaaatttgtttactcccagctacaatattttatagattttttttattgctgtttggaacaaaatgtgttgtacttggttactgctggtacacagggaagttttttactttttcatattgatcttatatccagccactcacttgaaatcttatatcaatattactggattgttaattatctcaattgttaatagattgaattatttaacatagttaattatattatcttcaagtagagacagttttgtctgtttccaactttgtttcctcccttttctcccttgctaattggctaatacatctagtaaaatgttgaatggtagcaagcatttttatatttcctaactttaatgacatcacttaggttttaccaatattttgtatatttgctgtactttttatcatattttttctatcctaagtttattattttatcacaatatggtggtagtttttttttaatgctttcagacacctattatgatgataaattaatggttttactactttgctttgctaatatatatagtaaattacattaatatatcttgtaatgtagaaatagccaaatttatacctccagccctaaattttcccttggactctaaacattgtataactaactgcttctatacaactcagatgaacaatacacttcttatacataatatagcccaaaagcaaacatttgattttttacccaaacccctttctcccttagtgattccaatcttagtcaatggcaacatgacctactccgctgctcagggaaaatcactggaagcatccttggccctcattctctgtaatcggtcatattgaatccattagtaagccttgttgtcaccacattcaaaatttatctggaattgcagcctttcatcttccatccctctagcccaaatcaccagcgattcttacctggttggcttcagtaatgtccagctggtctctatgtttccatatttgttctgtttattccattctcaaaccagcagccacagggatcctcctcctgtcagctgctgaaacattcactctcttcccaccacatttaaaataaaatctaaaattgcttccagggccaagaaggcacaacaccatctaggagctgacacttcctgacattatctcttatcacttttttcctagctcactgacttcaactacgttactcacattatgattccttggtgacaccaagcacattctcattgtagggcctttgcagttgccgttactctgcatggaagactccttccacagatactcaacacaactcttctctttacttcacttctctgctgaaaaatcattctatcagaaatatcattctatcagtcttccttgaccctgcagtcccagctggcccatagtcctcattttctatttctttgttctgcttttgttttcatccctgactttattttatgtattttaatcttgttcattgcttgtggctcccattatattaaaaattccataagggaattatgtgtttaatttactcactactctattctcaccgactagaaaaattaaaatgtatccagactttgtgaaatgcccagtgggcaggaagcaaaccacccccatttaagaagcattgcattgaatgcttattttaaaaataaaagaacaaatgagtcaaatcagcaatcttatcttctgatggaaaagaactagaaaagaagagtaagttaaacccaaagcaagaaggaagaacataataaaaatcagagtagagtgacgaataaggaaacacagagagagagagaagatagaaaaaaaacaataaaaccaaaagctagttctttaaaaaataaaacaacaaaatgtataaacctctagctaaagtgaccaagaaaaagaagatataaatgaccaaaactgggagtaaaagcaagaacatcgctagagactcaaaaataaagctgagtggctatgttattattattagacaaaacagacttcagaacaagaaacattaccagagataaagagggacaagacagttcataaatatgtatgtacacaataacagactttcaaaatacataaagtgacactgacaaagctgaaagagaaaaagacagatccaaaattatagtggaagattttaacactcctacatagtacttgatagatcaagtaggcagaaaatcagtaagaacatagaagaaatgaacaacactatcaactaacttgacttagttgacgtttatagaccgatcaacccaaacagcagaaagcacatacttttcatatactcagagaataataactaagatacatcatattttgagccataaaaggattgctaataaatttgagagaattggcgtcaaacagagtcagttctttaacttcaacaagattagatataaaaagcagaaaaaatatctggaaaatcagcaagtatttggaaagctgaataatgctcttctaaataacttatgggtcaaagcagaagtcacagggaaaaattagaaagtatttttaacagaatgaaaacaaaattacaatatagttggccctccatatctgtgggttctgcattcatgaatttaaccgaacttggattgaaaatattaacaaataaaaattgggtttgtactgaatatttacagactttttttcttgttgttattcccaaacagtagagaaaacaaccatttacatagcatttacattgtatcaggtattataagtaatctagagattatttaaagtatactggaggatgtgcatatgttatattcaaatactatgcaatcttactttagggatttgagcatccctaagttttggtatccacaggaggtcctggaaccaaatcccatgggcactgaagaagaactgtatgtcgaaatgtgtgggatatggctaaaactagggatatggctaaaactctgcatagagaaaaaatgtacaggtttaaatgcttgtattagaaaataataaagttccgaaataaattatctaaggtctcaccttcaaaatttagaaaaagcataagttctagagatccactgtacaacatcttgtctacagttaatgacaccatattgtacatttaaaattcggctggaaagattgatcctatgttacctgttcttactacaataaaaaagaaaggtaaattaaaatccaagtaagtagaaatgaaaattaataaagacaagaccagtcaaaactcaataataaacacacaaacaataaagaaaaaaaaaataaaactaaagcttttttttttggaaaaaaaaacagtaaattgtataaggctctagctttactcattaataaaacaaaagacagagatcaacaataatgtaaatgaaagaggggaaaccacaccataccctacgaatttatgaaagagaaattactaaaactgactaaggtagaaatggaaaatctgaatagtcctatgtatcaactaaatatactgaattcattaattaaaaacctcccacaaaggaaactccaggcccagagggcttcgctggtaaatgctatcaaacatttaagaaggagaataccagctctacacaaaatgttgcagaaattagaaaaggaagaagcactaatcaatttattttataaggccaacattgtgcttacaccaaaaccaaaaatatatatattacagggatttaaaaatttttttaaagctagacattaactttctcatgatcacagatttaaaaatccatagcaaaatattagtgaattgaattcagtaatatgttaaaattagaatgcatcatgaccaattggggtttatcctgctgggaggataatttgcaggcaggccctacttcccccgtgatgggtggactgctttgttgcacaacctccctgtctctctggaccccaggcctgcaccggccaggctgccctccagccctcccatcgagtgagatctgctgcagctcctccccaccttaagcatgtccaaatcctgacaaccagattttcactctgtcttttacacaacagtgaagtttgatcaatgcttcttaatctgtggataaacagtccttaaaagttcaagagcaatcttgttcaaaaagcagcagctcacattccatgatgaatttaatcaaggtgtccttgttcccatcctgtaccaacccgcctaactcatatccatttttaactttatttctctttttaacaacatactcaatgcagggaagtcagaaaatttggacatcaaacatcaaaatcagaagaatcactcaagatcccaccaatcagaggtgaccattgatcctattttcttatgcaaatttgtaagttattttctgactttgttattctgtttggaaaggatttttctgaccctcagaaggtaaactaatttgtgtctcttatcctttaagcaatttcctgagaataatttcaccatttaataaagcacactgcatgtgtaatataataaatacttttatagattttggtatatttatgatcctattattctctttcattgatctattttttgtcattcatttttaaacaatatgatttcataatatgttctaatacattatgtgcccgatttccataaatattttttccaattttttctcattttcaactttcattcatttcacgtttatttttctagataaaaggtgtaaaacatttttacatttgccaaaaatttatttagaagattgattcaaatttcattatatttatagattgacttaaggaagaaacagatttccaattctgtattcccgtttattaaaattctgtttttattttctcagtaatatttttcttcatttcctcatagatactccatatttaaaaaatactattcaacatttctatttaataattgtgtttgttttgaaatatagtataaggcaactaaacatgctcaagaagaccctttgctggccacagtgctcagtcatctccaggcagtgcaggaaaactcttctctatggaattccagcactcaggaaccttttcccacctcctgggattccacagtctctcttgtatgttgtaccatctttttgctctttagtactgcaaagttgacctctatttcataaacttctgagcaggtatagcaagagctagaaggagacatctgtccttatcaaatgatgatgtaaaaaactgcagctactggggggtaatttttgtgttcctgacacagcagcatattttgcatgagttttctttgcattagtcctgagtgcaataaactatgatcactgtcttttgtagagaaaagaactgaggtttatggggttgacgccactggtataaggcagtctaagcaaagagcccatacgcacaaaactacacatttttgcccccttcagagtaaataatttcaagactaatgtggatttttcctgcaccatccccttccagcagggttgggagacaaatctaccataatggatgtcctcgtccaatacttcttcaatacttttcctttctgtacctctaaaggctctgatttctctgtaaacatgtagatgagaagcctatgtaactaaagactaagatgacacagatggtaacatctccctggagtcacagaggtctctaaccaccttctttattactaattcttagatgactttctaacgtattttttcttaggttgcacctacattgattgtaggttgcaatgtaggttgcaatgtaggttgcacctacattgatgcaggactctctgcatataaccattctgctatactgccttttgatgatgaggttttttttctctcccagtgttcatgcctttatttctttttcttgcctgatagcattggctgtatctcccaaataatatcaaataataatgctgatagctgtcattctttattactcttagcgctctctctctctctatatatatacacacacacatatatatatattcaatgtgttatatgtgatggtcattaataggttaagcattttttacaagtttccaaaatatctttctaacttaattcttttaatagaaataatttttaaattttattagatgtcttttggcaattgagaattttttttgctctgttctattaacatactgaaatacattaatagattacctaatattgaatcacctttgttcttttaagaagaagtttccttggccatggtagcattttgtattataagactgatttgttgctcatattctaacacttgagaattaaaatctatactcctaagtaagagattctgtggttttctttttaacttttgtctctggttttaatatcaatactttgacaactttcttaaataaattatgaagcacttaacttagggctctcctgcttattgaagttttgaatagcttgcccatgtttgaaaattgaaaaacattttagaagacagtctcctacaggtttttgtgtttattcttcattattatttttttaagcactgggtatatttaagacctattaattctttgctttcatggattagagtttgtagtgattccattacctttattttctaaattttcattagttacagatttttgggcccttttgatcagttatttctcctccaatttagaaggcatagatggagctttgctaggatatatactatttaatatctatattaatattaatgtagatattaattttcttagcaagaggtacctaccatcagacagaacaatttctagcagaaattcctcaagatttatgacatgcatctttaaactctgacagtgctttgatcattttattgagtcctgggaaagagggtcagagacgacacagcaatccccatggtttccaggactctgctgtagctttaaactcttcccagtgttgatttgacttcctaactagattgctcattcttcagttctgaatccaacactctcttcctcaaggagacatttcctgttacatcctcggaggttttgtttcttccaatatgcccttcctggcatcctggacatcttttaaaataatcttccttcccctctagagtgtaagttccatgagatccagcactaagtctgccttggttgctatcgtgtctccagggcactgcctggcacctggtctttagtaggctgtccatacatttttgtcctatgatttctagagggcagggattcttaccatcctttgtctcatttccctggatgcagagcagatgcccaataaataccacatttcagaaaaatacatgggattgattagtttttcatttttcagtgactctaactctttagaaactgagtttttctctcctctactttatgactcaacagctgaaagtgatccacagagatgattgggcctcagcctctgacagtaacatgttgatgttaattcagacacataaatatctaattttcaaaaaaaaattccaggaaaattgattttttcttagcattttttgagttctccttaattgtcacaaatatctctaagaaaaaaaaaagagttcttccttatgtctaagcttattcctgcatgttgcaatgtcaagacactggtctttgttttctccccgggtatttgtagctattcctgctgtaattacatcttggccaaagttttacttgtctgacagtgagagagacagaaagacagacagcatgttcacctttaaactcaagggaatccctcttttccctcggaaggttaggggcagatccagcaaacagaattcttagcaaaggcaaggaatcacacacagaaactgcatcacaaaattgtctcctgaagtcatatcagccttccttcagaacttgcaaaggccaagcagacaattgcctacgtggcttggaaaatttctgacagactttctttcctccaattattttttcttcacagtttaaattcaggtctcaccattttatctaaggcactgatttatagctccgaagacttctgtggtagcatccccacgtcaactgtcatgacacagtgagccacggttagtctctaatgtctgcttgcattagcaaagttctgagtgcatgatacttaagactggtaagtttggaaggagaccaggcagtcgaaaatataggtgcttagtagactctattctcaggtagcacagggtgtcttcttcaggggaatatgtgtcatcatgaagtacaaggaagtcaatttcttagaaatagaacagaggtccatgcaggatgagagaatgctcaaagttgagacagaggggcctggatgagtctgaatctgtgattgacagttgcaaagaggaattcctcttacttggaaagatgagccccttatattgggattcctgcccaactctgtattaagacggttcacaggttcatggcttaccagtccctgggggcctggtgaccacccgaagatggttaagatggttctgtcctaaagagccctgcactggctttgaaaaacagtaagatgctctctgagataccttctgatacaattattctagaatgacaatgaccagggtggcccatactagaggctctaaatggatataagaaaacatccatttctctatcagtcaccaaaacacaggcttttagtggaatcctttagagtatgtgttggccatcctttaattgcccatcaaagtatccatttccctcacgttctttcccaatatcccatcttttccactagggttcttatggttctagtgaagataaatccatcctcagctttaggcatggaacaaaggaccccagctaagacaaccaggatactccattgtcctacacagagtgattgttttaatgattggaactcaccttggctcatccaatcaggggttgtatgggaaaagaaagatgtccagggaattgtaggcagtcaagttcatctgtgaagatgagatgagaccaatctataaaaggcagaggcgagacctcagtgatgtgtttgagcctctagattaagcctgaattgagttctgcctaatctccagacattaattaactgataaattctcttccctgtgcaagccaggttgagttgggtctctcttctttgcaaccacatgtgctctaactgatgagcttctctatgatgccatggctcccgtgcaaagtcattacatgctttcttgaacatttatttcaagatttgacaaggggcttctcctctccttgcgagaaacacaagcagatagatgtctggtttgagcgctccctggcggaggcaggaaccccacctcacaccggagatttctccttttggtaggcagggaggctgaagatggaagccccagcactgggacaccaacatcatacccctccctccccctcatctggccaccagcaaccctgtcatttccctgccactgggctggctcagacaaagctgtcgttgaagagattacagacagatgctctggcaggattcaaagaccccgtggaaggaaagcagtcaggttttctcttaagcgacagccatcattttcggcaggcaggaaaattgcaggtttgcccttccccagtgcaagctatctgaaggtaaaacaatggtgagcagcatgcgcttgcctcaaggacggaggggagaggagagaaggcaacagaaggactccatctcctttaatttattttaataaagcatgggttttccaaaaggccaaagggcctcatttgccacagcatggttgggatccgccaacagcttccccaaaccgcctctttccccataattcaatcagagctgcagatggaagcactcagctggcctctccatgttcttggcccttcctgaatccctcctctcctcctctcacggcctccaccagagaggaaggctcacgcctgccaacaatcatgcctcctcatccttttcttcctccacatccctgagctcccatgagggccccacccagggccttccctggccgtcggtcctcagtcttctcagccacaaacaaggagcaggtgcatatcctaggggggaacaggcaggagggtcgccaggcaatggagcaagaccccaggtcctgctactggagacaggataaatacctggaagatgagagatctgcagaacttggattctcagcccaaagaccaccatgcatgtcctggggagagttctgagtcacagaggatcagcgggcctgtgcaacctcaggacaccgctagagtggaaagcttcccctgtgggctctcctctcactgaaactgtctgggaggagcaaggaatcagagttgaaacttcagcaggagggaagcagggacagggctgctgcctttgttctctattaatgaggaagtgaaggcaaaggactctgcctccagtgacaacagagatttctttaatcaggaccttattttctacagccccaggtagaaaaattaacccatccgttggctgtaaatgaaccaaaatcccctccccaaggtgtcccattttgtctgacttcttgctacttctgctctttaggaaaggtcgataaggtggcattcgtgtttctgggctttgaaatttggaggcaatctgtgatgaaagatgaagaaaggaaatagtctttaagaaaattccagatgtctggagcaatggctgagactagggggtggggatggtcagtactggagtggtaaacggtttcagagctcagaagtgggagttttattactggctggaaaggctggcggtggtagtcagtttgagattgttctgtattttttttccactgtcaccccaagagtgtatcatcctcaaaattaattcagtgaaactgctcactctctcctgcactcatacctcccaggctgctacatctgcctctctctgtccagggaccctggacccctccactggcctcgctaaaatgtctagctctgagcatctcagacaccagcttgtgtcccattgtcctccatatgggcaggatgtgccaccacaagccatctaaaatgaacacattctgaagaatcaaaagaagagcccaagtcggggtcaccccatagcctagtttttaaaggcatcttgctgtgaagaggtcatatcctggtgtaatgctggatagttcttttctgagaccagccaagacacatagtggatcatagcaatgaggctgcatagagaagcttcctgggagctagagacttcagacactctccattcatctaacccaagcatttctttctttgtgcttaagcacacttgtactacagagcaaattgggtccatatgcaccatttcttgtaaaccccaagtaaccacatgctgttttctggaccagtttaattgcccatgaaaccctagagttgtctgtggcatggaaggcacccaaacaatcctgtcaccatcactgtcacagaccacacccttggcacgtgggtgggcaggcatcactgctgacatgtgtggcttgctgactttgggtccaaaacagaagggccatcacaggcagctcttatctctttctatttcttaaggcaatgctgctataaatgcctggattaggagtgtgaagacctgatatagccccagttgtgagatctaaggcaagatcttcaccttctgaacctcagctccttcctacttcacataggtctcatgatacctgcttcattacctcgacagttcattgcgaagaggattgtgaaagacagaagatgcacttctatcaatgcctgcaagggtgaaagcccaggtggtaaccaactgccctctctccctaagacctctagtcaacagagcaatattgtcatttgacatcaacaccatcaacagcagcagcgttcactcactgctttaaagccacacactgctttcacctggattatctcaaatattccttacaacacccaagggaagacagtgggtgtgtttctgccttccattgagaggaccccacggttcacggaaacccagtgaggtgcttaagacactatggcccatggagtgtcagggctacacccaaagccagccatgcactcttgacctgtcttcttcaccactgcatttcctctgctggttcacacagccctggtaccacctcagagacagcaggtgctgagatggtgctggagatggcacacctgccctatcagctcagtttcccaccctctctcattgctgcagaccatactgtcgcccaggacctctgttctcattgcgtctgggaaggaatgagccatctatccaaagttttgagattgtctaagtctgttttctgttgcttataacagaatatctgaaaccaggtaatttataaagaaaagaaatttacctcttacagttgtagaggctgagaagtccaaggtctaggggctgcctctggtgagggccttcttgctggtggggactctctgcagagtcttgaggtggtgcagggcatcacactgcaagggggctgagtgtgttagctcagctgtctccttctctccttataaaaccaccagtcccactctcgtgataacccattaattgttaatatatgaatggattaattcattcatgaaggcagagccctcatgacccaatcacctcctcaaggctccactcaatactatcacactggggatatttcagcaggagttttggagaggacaaatattcatatcattgcaaagattagtgcaaaacttggctttaatggaattcagcataggcaacccccaggccagccctggggccatggacagaggcttccagctggtccacagagatcagcagtgttgtgatccaggtcttctattttaagggacatatataagacagatgcaacctgctagctatggagacacagaattcaagccgggcatgatggcttatgcctgtaatcccagcactttgggaggccgaggcaggcagatcacgaggtcaagagatcaagaccatcctggccaacatggtgaaaccccatctctactaaaaatacaaaaattagctgggtagcggcgcgcgcctgtagtcccagctacaggaggctgaggcaggagaatcgcttgaacccaggaggcagaggttgcagtgagctgagatcgtgccactgagatagtgccactgcactccagcctggagacagatcaagactgtctcaaaaaaaaaaaaatgaaagaaagaaagaaagaaaaaagaaagaaagaaagaaagaaagaaagaaagaaagaaagaaagaaagaaagaaagaaagaaagaaagaaaaagaaagaaagaaaagaaacacagatttcagcaaaaatgtgtgggttcaactagatagacaggggataggagaatcagttctggcttcattcagggctgaaattaagttgccagttctgactcccttatcaagtccctcattgtcacaatatgcttggagttgcctccacctctgcagggcctggttcacttctcataggaagggcacgtgttcagaagcccagacacaaatatcactggtcccattgagtcaagcaaccatgacatggaagtaatcgctctgccttggagagaatagaccaggtgactggctgcagcctgtgcttcatctatggggtggggtcaggctgagggagaaggacaaatccattgaaaccacatggacaaactgagagcaaaagatggggagttcttcaagggaaactaagatgggcttgctaacagacaagaaaatgcagcccaggtatcccaaaaccccaatgtccctgaaggcacaaggaaactctcatcctctctctcaagcacaaatatgaaaacgttttttctttagaaggccagagggtaggccgggtgaggtgactcacacctgtaatcccagcactttgggaggcctaggcgggcagatcacttgaggtcaggagttccagaccagcctggtgaaaatggtgaaaccccatctctactaaaaatacaaaaattagcaggcatggtagcatgtgcctgtagtcccagctactcaggaggctgaggcacaagaattgtttgaacccaggaagtggaggttgcaatgagtggagttcacaccaccacactccagcctgggtgacagtgatactctgtctcaaaaaaaaaaagaagaccaaagagtaaacattagaggctttgcgggccataaggtctctgttgcaactgctcgagtctgacattacagtgtaaaatcagccagacaacatgtaaacaaatgagtgtggctgtctttcaacaaaaccttattttagggacactgaaatttgaattatatatcattttcacctgttagaaaatactactgttttttcaaccatttaaaaatgtattaggttggtgaaaaagtaattgcagtttttgcacggaaagtaaaagattggcaattacttttgcaccatcctaatagaaaacatccttagcacacaggccacacaggcaggctgggtttggctcacaggcagtgatttgctgatccttgttcctgaacaaggattctcaggaggtgggaggcaaggattagggcttctctcactgtcaaaagggcacacagtccaagcggaattgtgcatctagggaacacggataagaaagagcttgaagggccgagtgtggtggctcacagctgtaatcccagcactttgggaggccaaggcggggggtcacttgaggtcaggagtttgagaccagcctggccaacatgatgaaattccatctctactgaaaatagtaaaattagccaggcaaggtgatgcacgcctataatcccagctactcgggaggctgaggcaggagaatcactggaaccagggaggtggaggttgcagtgacctgagatcatgccactgcactccagcctgggcaacagagcaagacttcatctcaaaataataataataataacaataataataataataataataataaatttttaaaaggcttgaagagatcatcggaacaaattgaaattcttagtttggttagcaatttacctatgtcctcttctgtactaatttacagagagaagtctattaatcattctggatgcagaaaggaaaccgcattctcagcataaacataaattatcagcctaaaactcaaattccttcagagggatgaggcacattgaaagtttcaaatagctcaaatagaacaaatggataagaagagataatgcatcttttgaaatacaaacctgaaaagatgttatgctcaattacactgacaaaagatttgggatccagcaatatcctctgtggaattctgcagctaaacaggaatgctaaatcacaaactccaacttaagcaagaataatatagcctaagccacattacacgcgcatccgttgggaggttgaatctgctctgatgtttacaaagtgcctctcttcgtccctataagaaagtgggcttgcctgctaagacccatgcatcaccaagcagccaggcttccaaattgcccatctgggtgtcttggaaagaaagcaaggttaacagaggtcaagagagttcatgatgaggcctggggtgtgaaggggcgggatctggaccctttggagggaggagcctccattctaagaagccaatgacagggaaagaagacacgggggaagatgaagacaaaagggagtttgagtgtggttgggggtccacagtgccacttaggcacaggcaaggagaaccatgacactgaactcaggccactccagccccagcatggccccagctcctcgagctggtacagattgtcccatcccttggaagtctctagttggccttcctcagccagtctcgacttcccaaaggggaaggctttgtctcatctgcttcattgcatcccacagcacagctggcacacagtagctacccaggaggtgatgtcctaagaagggcatgtgtgttgggacatcagaggaacagaaaagagatgccaggacctgcaaaacaagagctaccactgtcacattttccagaaggcaggctgagattctacatgaattaccagttagtgtcacaacacgtgttgaagggctgactcttggagtttgtaccctgggtgtcctgggagggagacagatgggttaaaagaaaagaagagaaaaaagagattctgaagaaatggaggggtggttcttctctgtgcagcttcaaagcgcaaatccaggccctacagatgtgtgctggaggaagatggtttgagctgcacatacggtaaggagtaacaagctcggcaatgccagcagctgccttatggaggatggagcttcccgccactggagctggttgtgcagtggtaggaaaatcagccccaagagtgagtgcaacctgcaagtaggtaaaagtaaggacgtaagttgtgtgaccacatcttgtgatttctggtgtgtccagctcaccataagacctgaactgagaaacagacccaggaggtagagagagctgtgtttagtagttacggctgcttacgctggactggaggacatagcttgaccacctaccaatattgggcttcccaattctcccccagctccatgcctagagtgcggtccctcatgtcaggaatctgggtgtccagggcagatgtctacacagccaggggcagagcatggtgtgctgtctgatactccatggagcacagatctaggaactccagatgtgggtcccccctgcttcaggaggcaggctgggccatgcctggtgtgccttcacgaggctgcaggagaggagaggtatccaggcttcaggggagtccctccccaccccataagagagactaagtaacgtggtcaaagaaaggatggaagccaccttccccacaccgagcactagagtctcccagaaaaggaagggacatttaccctccttgcaacaagagctttgcagggatgaatggaatccagacccattcctcaagggaggccatggtccttgaagtttccctagaaggcaccgaggacgcatgacaagcagctctttagccatctgctggggaaataccagagtaaattaaaacaagagtggatttgtgacttctgtcttttccaaaaagatagtgttggcaggtttatgagaaaaccattcccaaacaccttgaatttatatggcacgcttatttcaaaagctcttccacatctgttagctctttgaagcccctggaggcaggtagggcaggaaggagaactgggtggaggaacagaatcacagaggggctgggcaccttgccaaagaactctcggctccctggggagaggtgggggtggcaccctgcaccctgacccctcatacatgttcaggggctgctccttcttgcctggagagctctggccaagggcattatgtaataaggctggaagcaaagcgaccacttcagagcagggcagtcaagtacaaggagggcccgggagcacccctttctcatacacaaacacagccctgcacccatgtgccctgcaaattagccaaggtttacaggtaaaggaataatggctcctcaaacagaaacaaacagaggctgattgacaaggaggcccctcataatcagtgctacagtaaactctactaattatggtgtcaattggtaacattataaaggttgaagctacataatgaaaaaagagcgtacacacaggcagagtgagttcagcagatgtaattacagggtgacattattggcaaatagtattttatgaggtattagcaggaatgtggcatgaacacattccaaaacttaacaggctcctcagaagtgtaggaacccagaactggccagagacccagcccccaaaactgtagtttgtccagctgagcattttaggggagcccctgaggtcttcttgccatcttcaaaaggagaagacgcttacaggtgaatccctatcctacccttgacatctaattccttacatgctacatcatctccctgttccttgatggtcctgagctctttcatcctcatatcataagatcttggactattcaagccagagggcaccatagatgtcatttaccttgacagttactctacggtgagcatgggggaggaacagaagcctacctgttcattctaacaatatttactggtgcccaatagtattcatggaattctgtgccaggctcctgttctagatatgcaggctatggcccttgctgtcatggtgttcacattctgtgggagattgaagaaaaacacacaagatgctatcaggtgctatgaggaaaactgaatagagtgatgtgatacaggtggctagaagaggatgggcagattgaatgggaggtccaggagactgctttctgagctgagacctacaggaggagaggaaacatgccttttgaaggacacccagctcccaagcagcagagcaagggcagaacacaggtgtcctcacatgcagcccagggtctttctattgcatcaagcatccccaaccactacttgagccggaagagaagagacattaccaactctaaggatatgggggcggccattgcattgcgaaggctaaaggaacattaaagatcaggtggttcaaaatccctaatatgcaaaagaatcacctgtgttatgtgtcatgaaggagctgcctccaaggtctggttgtctgtttctatatagcataccatcacaagcttatatcacctttcccatttctatgaagtgctagacagttctcgttcatggtcgcctgtgtggactacagtcagatggtggctggggctggagccatcccaggtttcttcacgcatgtgacttgtgtctgggctggaatgactggaggagctaggaactggtcaggcttctttgcctatggcctcttccttcacaactaggttgggcttcctcacatcatggcagtctcagaccatgaaaacttgaaaacttcattcatggaggctgcctccacccagaaaagcatcatgaaaagcccaggcaaaagccacagggtttcccaggacttagcaatggaaggctcaggacattctttcttattttttataagtttatttattttttaaattgacacacaacatttttacatagttattgcatacaatatattgctttaaaatatgcatatattgtgatatggctaaatcaagctagttaacttatgcatcacctcacatagtcattatttttttgtcttgagaacacttcaaatctactgtcttagaaattctcaggaatacaatacgttgttattaacaatatccagtaaatctcttgaacttactcatcttatctaattgaaattttatactctttaaccaatatcacctcagttcttcccctgcacaatcccttggcaagcaccaacctactctctgcctctgagtttgacttttctagattccacatagaagggagatcatgaagtatctgtctttctgtgcttggctcgtttcacttaacataatctcctccaggttcatccatgttgttacaaatggcaggatgacaggacttccttcttttttaaggctgagtaatattccattgtatatatgttccacattttttaaatccattcatttattgatggacacttaggttgatcccctctcttgtctattgtgaatattcctataatgaacatgggaatgcagacacctcttcagcatatttatttcatctcctttagctagatattcagtagttgggttgccagatcatttagtaggcctatttttaattttttgaggaacattcacactgttttccataatggctgtacaatttacattcctaccaacagtgtacaaagatttcctttattccacatctccaacatagttattgtttgtctttttgataatagccatcctaacaggtatgaggtgatatctcttcatggtttcaatttgcatttctttgatgattagtgatttttgagcattttttaatatgcttattggctgtttatatgtcttcttctgagaaatgtcaattcaggttctttgcctattttttaatcggattatttgttttatactatcgagttgtttgggtttttcatatattttggatattaacccagcatcagttgtatggcttgcaaatatattgtccaattctgtaggtagtttcttcattctattgattgtttccttggccgtgcagaaactttttagtttgatgtaatcccatttgtgtatttttggttttgttgtccagaatatcctttctgccacaatgtattgatccagcaaataagtaagcccatcctagattcagaagaagggaaattagactccaccattgagtgggaagagtagcaaacaatttgcagccatctttaatctaccacactcctctagtgtagaaacattgcctctaccaaaggcctgcttagtctcttgacaacctaataaacatatgccattcacattcagattgtctttcttttcctcaaaacaatcaaagaattagcccatgtttattgggggcttatcgtgtaaaaatacttcatgctttgtccaccatataccatataccatacacaacacacagtgtgccgagccttccctctaggagtgtgcattcaagataaggtgtcacattattccattcgtaatagcttaattaactgttagagtgagatttgacatgcagcctcggtacataaaacaggccaaggtaggacaatttgggctacagtgggagctccagaacgcctctgctgaatcccagctcagagtcacagtgtgcatgacatcacagtggatgaagaaagaaaataaagggcaatgaaatatttcttctccctagaagcagctttcttgataaaaatatatgaaccttggctgggtgtggtggctcacacctgtaatcccagcattttgggaggttgaggtgggtgggtcacttaaggttaggagttgagaacagcctggccaacatggtgaaagcccatttctacttaaaatacaaaaaattaaccaggcatggtggtgcacacctgtagtcccagctacttgggaggctgaagcaagagaatcgcttgaaccccagaaggtggaggctgcagtgagctgagatcgcattactggactccagcctgggtgacagagtgaggctccatctcaaaaagcaaacaaacaaaacaaacaaacaaaatatatatacatgaatctggccctatgggagagctagtagagtaataagactttttagcatattaatgagttttttattaaaaatctatgtcaatctgacttaggcaaaaaaaaaaaaaaaaaaaaaaaaagtcctaggggttagcttgtttcaggtagggctgaatccaggggctcacaagatatcctatgctatcacaagatattagtataggatatcacaagatatcctatactaattaacatgtaatatactaattaatacaggattgagtctcctcagctttcacttgtgctggcttcactcccaggggcactttctctatgtccttgcagggacaggatggccaacagcagttccaggcttacttctgctgttgtgctctttctctagatcatttccaccaaatttcgctctagttggccttacttgagcgcaatgctcagaccacataatcagagtggtcagcagatgttctaccctgactggatgtccgggtagtcaaatgtaccctggagccccaggtgagctggtgaggtcacttgtattgagaatgaagggcaactggctccccaaatggactaggttctcttgcaaaaacaaacaaaaaggtagcctggaagctggggaggcaaaaacactcacacagaaaggaaagtacagcaaagaattgagagacaggaggacaagagaccaggtctggaagcggggggcaatgcctggtttcttcccacaaggtaacaggcgtgcccagctgtctaggtcttgactgccaatcaatgaacttctcttaaaagtggtactggggccgagcacagtggctcatgcctgtaattccagtactttgggaggccaagatgggcggatcacttgagctcaggaattcgagaccagcctagccaacatgatgaaaccccatccttacaaaaaatacaaaaaaaaaaaaaaagcctggtgtggtggcatgcacctgtagtctcagctacttgggaggctgaggtgggaggatcactttagcccaggaggcagaggttgcagtgagctgagatcaagtcaccacacttcagcctaagctacaaagtgagaccctgtctcaccgaaaaaaaaaaggggagtccctgcatccctgggaggaggctcaaagtcagaggttagcccttgtcctgtaccccgtcaccagctctgccttcggcgctgggcctatcaccggttctccagcaccaagatgtcctctgagcttggagagcacccagacatgtcccaaagagcttttcagtgggtgctttggcttgaaagaaagccagggaaagagaaacacaactgccacgtggcattctgaaacattgccattaagtttaatgccttcctaacaaagaataccacatttattatcacaaataaatccacagatttaacacccatcaggctttagattttatttttccatataaaataaatatggccagagtataagattatgatggcaccattattttctaaaactatttaatttaagcacagcccaactgccccatgctggacacaggaagggaccaccccactcctggaagaacactggtcccactgactgcaaaagccaacaaggtaggtttccccatgcaactgctgggtttcatcactgtttaatgaattgttgcactctttataggataaacaataaattgcacatgatttatcatattactcaataaatcatgggacaaatcattaggcagagtgataaaatcaagtgttttagaaataagttaatctatgatgccaatgtgtaaactaaacagttgcttaaaaaccctatttactaatcatttttacataaagaaagattaatgattatgtagattaaatgtgtatttactcctataaacatcagacagccatgtgccccgctggccttttctttttagcaaaggccccccagaagcattcctctcgtaacaaaatttcatttggaatttggcacgatggggaagggagggtggagaagcctgggaaggaggaagaagtggttaatgagaagcatgtcagcggaggggtctggtgcagaggctgttctcaccgtaaattttgaactacactaattaacacttacattagggcttggagacaggttccaatgctgcttgcttctcccatctgcccgtgacctagcgctctatctcacttgtgacaactatgtttatagcttctctgcccatcgagctggctggcacttcgaattaccctcaagagtccatgggcatcacgtcacatttgcgtgcccaatatcatacgtgacgagtcgtgccaccgccagggcctttaatgcacatcccacagacggccagcccctggaatgcataggcagatattaagctaaatctttttggagtcaagcttgtttcacgtcagttacacaaacatattggttcccttaaaagaacaaatgctttgtgagtaaggaaacgactccaggatggaaacttgagaaatcgttctcagtgtcaattcagcccttccttctgaaggccttttatcttagggggatgagggcagagactgtttggcttctagaatatgagttttggactaaatttattataaactggatattattaagcaatgtcaagggagaggaagggtgtgccccagctagtgtagcagggaagatgatcagaatatcagagaaggtgtttttctctcttgccactaaaatattttcattttgaaaatgcctaattgcatatgattcctctgactttgaattcctctagcacaacaaatcggactctggagctgatccaaacaatgcacagggaagtaaaggcacttcgatgtgttcttacacattctcttttgcatgaagtcatgctagattgcttgagaaagtgctaatcaccaaggtttgggaactcccattcttggtgcccagcaaaacagttgttgagaggttgagtaaaggatgggagaagagagagactccaaggactgcactgtgttatcatttttctgacaagctctaaaaaatgaaatggataaattttactgacaacttcagcttcaatgaactacctggaaaatattgcctccaaggcagaaatccaagacatgagcttttacacgtggtccttagcccttcccaagaggcagaacatgaggggttatgggaggaacacaacaggagttccagctccttgtacatggccttcccctgagaagccactagctgcagagtggagtacagctctcagacatggagaaactgaacccaactaccaagataaaacaagaaaaaggtgcaaagcaggtagtatttctaatgcccagaaaagaatacaccaagtgacagccacactgcgtcctcttttcccttctccttatccaacccacctcaaaatctaccctgagtcacatttcaaataccacctgtatcagtcaaggggaggttgagtttttcttcagtaacataaaagatcaaaatctcagtagcttaaagtgaaattttatttcttgcagctgcagcgtcaccatgggcccagggaactggctaggacaattgtcctccctgtggtagcctagcaattggtttaatgttaacttcatagcattatggaatttcctagcaactgaagaaaagagcattcagaagcaggtgcttcaatgctttcaccagaacggacgcaccattttatttgccagaatgaaccatgtggccaagcctaacttcaacaatgggaaatataactctccattaaccagaagtagagaagaaccagatcttgagaaatattcatcagactgatcacacagcccacttcccagaacccctttctctgcagccacatcattccctgcaaaatctgaaaagcaaagctttttatttgtagggctcatttcccaatatcttgctgttacaatggggaccgctttcatccttaaaacagtggtttatatttctgtcagggacagtgagaagcaaatgtgtgtagtgcattttgcaaagaagcaatacagtggccaagaatgtgaattctggagccagactgcctacccttgaaccccagctctgccacttactgcctctgtgatcttgggcaagttattcacttctctacacctcagtttgctaatctgctacatgggactagtgatggtgcctaactaataggattattgcgaggattaattatgctaatactcactacagtcttataaagatgcctggcactgagtgagggctatatacgcgttttctgtgactataatgcttcactgtcaagaaagagcactctaaaaagtgctccactggcctgattggtcattataactaatctgagagaccatctcactccctgcgtccttcatcctctcccccatcccagacagaggccagaaggatgttgtgcttaaaggctgaggaagtcctttggaaatgaaatttgggtgagcggtggtggtagtggattatttgctctgcaagtgaaaatgggaggattttgaaagaatgtggcagaaacagtcatgcctgccaaagagtccatatgtcccctacattccctagccttcttgtagttaaaggggccttatggctagccatagccagtgagctaggggcagaagtaacatagccacattctgggcacaagatctgcttgctaatgcaaggtcctccagaattctgctgtcccatcacaatcactgttatgtcatcacattgtgaaggcaacacctggattgctgtattacactggaggatgctcgtggaattgcatgtgtgaaaacttttgctgagttaaccctggatattttacagtggttcgctgtgatggcatatcctagcctaaactgactaatacaaggggtttggctcctaaaagtaacagcaaagaacagagaagatggtcaagctacagtttggagtgtctgaacatttcttaagaccaagagtagttcgtgacaatcttaaggcattttgcattgctacggtgtatatgccttctatctctccttttctgtttttgttttactgtgtttattgtttattttgtaagtgtttgcacaggtagagcaactaaagaaaaagactgcgctctatatttaggctgacaccaggacaacgataaagaaagagctacaagtcaaagcctgagctttgcagcagaaagttagagctagacataattaagataacatcacaatacaccctctctagatatcttagaggggaccttaaactttccacaggatatacagcaaaagattagtcagtctgattctttcttaagaggtaggctgaacttagctcacaaaagcctaagttaggatgaacagtaattaatatcatctcacatattcagatgacaaggaaacaaaaaggattcagagagactgagtaactttctgaaaatcacccagaaagaaatgtagtgaatccaggactagaactcagatgttttactcctaaggtaatatttatatgtaggccaatctccatagagtcaaatttgtcagtaatccccatgttgctaaatccagcggtcaattctcaggccttggttgtggacatacctgcagcatttgatgcaattgactattttctcttctctggagaactcctttcaattggctttcagagcacaacactcttgggtatcctcctgcaacactggctgcaacattttagtctcttttgcttaatttctttcttgttttctcaaccaccatgttgagggtgcttcagagttcagtttttgttttatgttggtggtggggagaaggtctcactctgttgcccaggctggagtgcagtggcaccatcatggctcactgcagcctcgaactgctgggctcaactcaagcgctcctcctacctcccagcttcctgagtagctgggactacaggtgtgtgccaccacgcccagttaatttttgtattttttgtagagatagacaggattttgccatgttgcccatgctggtctcgaactcctgggctcaagagatttgtctgccttggtctcccaaagtgctaggattattgacatgagccaccatgccgggcccagagttcagtttttagatgtatgttctagatattcatcttcttgataactttgtctagtttcatagttttaaatgccatctgtatactgataaacctaacaaatgtataactctcggcctctcccttgaacttcagaattgcatctccagctgctacctggcacggctacttagttgcctaatgggcatctcacagatttaacatgtccaacgctgggcatccaatcttcctctcttctccaacctactcctgcacagttttctacatttcaaccaactgcagttccaaccttcccattgctgagcccaaaaccctggagtcctccccaatgattttgtttctctttcattctgtatccagcccatgagcaaatcctcttggttcttggggggttttaaacagtacaacagctgccatcgtggtccaagccatcaccttgactcgcctgcactcttgtgttcgcctcttggttggtctccttgagtcgcctttttcaagcctttgctgaaacatcaccttcaatatgaagctttccttggccaccaaatttaaaactgatcaactcccctttctgtgacactcctaagacgctttcccccggcacccagaagcttctctcatgttacataattttcttatttattttatctagacttcatctccctcctaccagaaagtgagctccagaggagctgggagaatttgttgtgtcctagggtgtagaatcacgcatggcacaataacttttgttcaacgagtgaatattgaggactcatgtgctccgcagcctgacctgccaccctctgccctctccttctagtcatgatctggctgttgaattccttctcaccctagtttttctctccacccaggtgcttcaagctggtgtcttgaaggacaggctttgtcacttctctgccagctcccccacatcctacttcttaaacatccttcctggcttctgcagcagcagatcatagaatcgtctctgcccgttcatcagcctcaaggccctgatatacttttccattcactaagtttatgctctgcttggttggaactgggattggaaattttatggtccaggaatcccttttcctttgctgtgacatttttttcccgactgctccaacccatattgaactgatttcccccatacctaaattattttagggcatggataataacaataagcattacatacatttctccctgaatgtttgtaacaatattagagagatattattattattattttatcaacaagaaaactgaggcccagagaagttaactagttagccaagttactgtgagataatagagtaaaaattctaatgcaggttggtctaaattcaaaccttgtgcccttggccctttcatacttacggtcagaaccaaagttaaattcttagtcacttctaattatttcctggaagtgggattcaagttccctgggggctcatatataggaatggtcatacccctaatctgtctgtgacctctttggagcctggtttagaggagtctttctggcagattcatcaggttcggtggcctttggtgggaaaggaagaaaatgggacaactttatgaatcattatacaagaaagaacatcccaatagaaaactgccctgcacggaaactagaaaaccctactccctttccctcctgcttcactactgcatcttggtgaaaaccacaatggcacatgcatgcttattacgatgggaaagaaagagatagataggtgtgtttttatattttccaaccaaatgatttttctgctccttaagtgatattttcagagactattgttactgaggaagcagcctcctataaatctggaagcagctaatataaatctaaccatccgcctacctatgtattcagtcccagggaagatacgaagtctcttccttgtagggattacgaagaagcaggtacaagtgacaaatcaaagagcaaggtaagtgactatattcatgcactgtgcttctagtttgtaaggcatgttctcatacattttatgggcactgtactaatgaagagctttgaacaagttcatagactaagtacgtagatgattcagggttcaaacccagttttcagactccaagtccaatgctgttggcaccaatacacactggaaggttccatcctgatgctcacataagtaatacactcagacaatagatgagatctgctcttatctccttattaattaccttgtgaaggtcaaaacttaactactagcttctttgtgctgttatttagactccccggggactgccaccttgccttgagtctccaacatggctggcatccctggacggtagaaattacatcttgcacatcatttatttccaaaggatgtccagcaatgctctggaggcacagcaatgctcagaggccagcaacaatctcccttggccatgcaatattccccagctgttctcatccacatagaactggctcatcttcaaatcaggtatgcagtaggtgctcaaaaaacacatgatagttgagaaaatatggagcaaatgcaatcgtgggctgcaggatacctatacccacccccttgacaatatcattcctcctcttgaatttgggacgtgggtcagtcctgggaacaagagatggcttgagcatgtttggatccatgtcttccagcagccatgggaatcaactgcagaccctttgaacatgacatgccactcaatttttttggtgtgatggaaaatcccacacccccataatggccctgtctccaacccttccaccctcaggttgtctctcaatccttgatgtcaactgccaacctctcagaccaaggcttgggactttgccatatgggatgcctttgattacagtgggggtcactatgaacaaggattgcagagttgttcagaggagattaaaaacctgccccatcaggcagccagtgcatgcccaagccaagaagaaagctaagaatctccactcccactttatgatctaaccactagactgagctcctgttacttgacaaaaatgatttgcttttaattaaaataggagcataagctatttttatccctatattattgggcggtaagtaaattcacagtaactcactggattttttaaaatctattttaaatataaacacactgccatattttctgtgggtttgaaagcttatgttaagtttgcaaataagtcaactccataaagataacatctttccctaaaaaatgtgttgcaatctaatggcatgctatggaaaattaacatcttattaagaaaatacatgaattctccctccgttgaaaaggtccaaatagcgctgagtttcttacctgcccgtgagacaagatggactgatggggtggcctccaagcctccaaacccaggcaccccccaccccaggagtgtcctctgccaccctcacgggactcacatgtaacaaaaagctgtgattttattttgggtcatgctgaactctgtttttgaacttatcctgttacatgtctgacaggtcctgtattcacggagggacctgcattactctggttcaccctgaaaagatgccatctcagacaggctgcatgggaaggtgcagtgatctcccagcccagctgcctgtctgaacaccagggatccaggtgaatccccataaggataaggacattaatagccagatctcacatggccgtaacaattagagctcagtgatggggacagagccctggacttctaacccattacaaggaacgtaaaaacccaaggccacaaagggctaggtatcatctttagatgcgatgagagctcactgtgcactgctccccaagtgaattcccttctggtcctgccttctatgtatcttcttttccccactccactaaagagtgttttaggaacctagcagatggacctagagccatggctctttcttgtgcctcaatgacacatgttttcaacaccctgccctgggcctgagcctttgaggggttccaccgatgccccgtccaaacctgcattcaccttgcttcccctttccctcctctgaccactggttctcagaaatcttaccaaaatcaaaggacttatgtaaatatgaaaagggaaaagctgtcaaaacctgcatgagttgtttaaataccatgaataagaaccagtaacaataggcacatcaatgaagatgtgcttccttcagacttggccaggtgccacccaacgcgagtcccccagaaaacgctgctcactcggcaagcaagggagcttggctcacccgccccttcccggcgccccctccccaggaaaacatttttgacaagcaactcatctagagccatttcccacagctttcctttcatttgcattctcattagaataatgtgatttcgcagagtgggaatgtgtgtaagtcttcaccaccaggaggaaacgctaaaacccagattccaggggacaggggaagatctgcccgtggggacacagggcagccaggaggagccccgccagggcttggcatgtggcaccagccagggtcagtgaacgcccacagtgacatcacagccaaacaaccgggaccttatgaaaacctcgaattgacccaaaccggaaaggaggtttcgaaatggaagaaacacatcccccacgttttgaaaaataggccctggcatcaaaaaagagtaaaacaaagtgttttcacagagaatgggaaaagcatgccttttgctttctcctactgctttgttttcttgaagatgcttgcccctaatttaaaattgccacatgccaacttttaaaagtgctataatggaatcagtttctctaagtcattccagggcatgacttatagaataatgtttttagtgtacccactgtgtgtgtgtatgtgtgtgtgtgtgtgtgtgtgtggtgtgtttgtgttttaaaaggacatttactgagtgatatcttgtaaatattttttggtcatttaaaagcaagaaacaaacaatacaaacatcctaagttctttcccacatcctaagctgatttccattctactttgggaggtcgggtttcttttatgtcctgaaaaattggaaaagcttatgaagccaaaaaactttgcaaagcaaattttccagtatttgcttagctgggtcttcaagcaaggaaagaaaccgtattcggtgtaaagatacataataaatgtctcagaacaatttcaggacagaagaggagttgagagtgggggattgaaaacggagctggaagtaggaaaatggggcaaaatattgagtttcaaatgactgtaaaatgagttcaactccagaggagttccttctggagcacgttttccagccagtccttgtaaactagatctccctgcattagcaagtcttaaggagcgaagaaaaaaagtgaattaataaaatgttcctgtgcaacattgtcctaccctgctcagagatgctttctgggcttccttggggcaaactgggatcacgttcagcattccaagtctaaagaaacagaaagggaatgtgttccacctgccgactgacacctctgtcctaggtcacctgccctgaagatgctaaatgcttttccaacgtggtgtaatttgagtttttttatttttttttaagattctatgagcatatcacatttcataaacataagaatgacatttcaattttttcatataaatggcaaatttgcagaatgagagaaaaaaaacaagactctagaaaccattttttgcacactcaaagaatgtgagcacagcccccttctggcaaggacatctgtcactcacacagacgcaaccctcttgaagccaatgtaaacagctccttactctccctgcctggctcttgggtggaggcgcagaaccttcggcggtgtggatggagcttcctttgaaaagtgcatttgcgttttggatagcttggcgaaaagcacagagctgttttctggggtgccaaactgtttctattttcccattaaaaggaaggaaggaatatatatattcctaagtggaagtgcattcactacatacgcagacggttacaaaatttgggcgaaattaatacaaggcaataaaaatcatttagcatatagataagtcaatttatcatagactttctactagaagaaacatgagcgttctcggccatgaccctgacaaatgtctctgggcccagttctttaagcgtagtcatcgggcgggctccgagtccctgtctcgggctctgtgagtgtctaataaagcgtgggtgtcaggagctttgtcagtgcagtctctgcctgtttggttcatctcgtctcctgaataaagccctgcagtggcagtgcaccgcgactgagatagcttggctgacactattgatttccatccacagtacactttgtcaaaaatcaaatagaaggccctttggaccctttcacctttaccaaacacaccacaaataaacctttttatataaagcaggagaagggccgctctgtgggaacattgtctccttgggtaaatgttaccgggagccctcactccagtactccagcacaaacttaatcacaagccgagttgagcaaggagtaataaataatctggtcaaggtactggaagagagaggggctagatcggagccagagactgggcaagattgagagggaaaaagacagagggagggaacgagagaaagaagcaaacattttaaattttgttctgtgaatcttttttcccactttatttttttttacatttaaattaaattcaaatatagtctttttaaaattgtaattagattcttttttcttttttttttttttaaggaattctttccccagcatccactaagtaaacattatagcaaatacattactggtcagatgtatgcattaagtatgccataaacctttctactggccaccgactctgctcccgctccctctctctcctgacacagagaaaatattatgcagtgactcgtttctagtgaatccgtgtgattcattgcccaattttaaactgccaagctgctaaattgcatcaggtctgccaaaattcattccaggactacgaggagatatgaaaaattaaatgtcatcttggtacagtggaaaacttttacctttcagagaacagaatatgctacattctgtaatgatggatgattgcccgtggctatacttaacctacttagtaatgtcatgtagtggaaagcatgtttacctaaaaaaatggcagaagacataaactgtatcaaggtctgacatcaacgcattttcctccaaataaagtgactttttatgttgattctccgatataaaataattttttctcatcagcatttgcggctagtactctgtgttgcgagggtaaggaccgaggcacctcggccattctctctctccgttctcggaggcacaatgcctttgtgctacctgactcaaaaacgctgctatctgttccggccacagcttaatcacataagtccctaagaagggagaagccgagataaaaatatttgaactgttgaagaaatacggactcacggaacctacaactgagtacaggaagaaacattttgcataacgactccagcctgcctggtaatttttctcttgagcctagcgtttttctgacagcttcatttgtttaacacacaactaccggcactcttagttctagattatgataccggtcttcggtgcattattatatcttcgctaaaggaggaaatttgggaatacctggactctgatgtctctaaaatgtatggccactgagggtttgctccgattcctattatggcctcatcttgcaggcacatgcaagatgttcgcctaagaactctcagctcagcgaatcccggctccttcctcagtgccgaacgcaagggctgtgatatttattattatgaataccatttgtattaatcattacgataaatgactggtttggctatctgaatgcctcatttagagaaacttctctcctatgtcattgttataaattactgccaaagctctgtttcacccaaggcggcttcattcactctttcatatttttctgtccaagagacgttgttacccatcctccaagcaataggctgggagggcaattgttatcattgcaaagatgtccacatacatggcaacagagagttgtggattgttgtgggtgatattttttccccttttaggtgaacaagaggtattcttttcacatctatatttgattaaattattcagtgctacaaactgcaatcatgctttattaaaaattattacaaattcatgcaaggactacagatgtgaaagaatttattgcctgcttgtttttctaatttgcatcattgattttgcagggaagagttttaaaaacaatctttattacatagattttaaggggaaatcacagagtaatgtctcgtaagatttatgatgtactgcgtgttgattttatttacatttttttttatttctttgcttttgaagaaaggttgaaagataaaattaggtttgcacttgtaaacaatgaggcacaaagataaaaagaaatgtttttctaataaagcaagcccacagacatgaagtgcagaacgtaaggtcagaaaacagttaccagcttttgagtcaataagataaaagggataatgaattatactgtaaacacctaaaacacagcacatctttttatgttgttaaatccatcttctcaattcaagaatgttatttgaacaattcatcatttatagagagcgccagctatggctcccacatagcatgttccaacatgctgcggtggcactggtcagaaacccctcatttataacaacccccgccataatcaaaagtaaacccagaagatttgatgcaagtcaaatggggcagaaagtgactggttaggccctcctagactaaataattcactaggcactagagagagactaaaccaatgcatgcatgtctcctaaagaaatgaatgtcacattatattataaccaatttataaacatgaaatatgcatgtttaatttgcacttaaaagtttaatttaatgtagaagacattacttattctcttctttgttcaccctggctaacccatgaatgattaaagagaagttagaggactcctgtttccttttttttttttttcccaaagaccatctccacagtttcccaactctgcttcccattgaattctgagcaatgactggctactttagcaattaaaatccaggggcaaagacacagcagcttcgttgggctgagagactccgccattcatcatctcggctgccataaaatagcactagatggaatctttgattttagctttagaagatcataaatcaaaatctaaagcacggctgtcagaggcatcaccaggattatccattggagaggggctggagtgcagggcacacacaggcattgttcccactgaactcacctcctgatgcatagagaaaactcctagccaagcacttgctggtgtataagtactttatcctaagtgacccataaaaagactctcaaatacaaggtttgataactacagtcacagtaattgtacgcttgatatgtctgaatataaaataaataggcccgcctggctgggacccaccctgcccagtcccctgccctgatcgcctggtcagctcccttacccatgagctggctgagtcctggataagggtgtctgttggcgagagaggcctccaagtaggtgcccccacctgcctccccgacagtgagatgactgcaatgcagggatgatgaccatgatgggagagatgcagctagagggaatccatccccagaggaaagaagtcagccttgcacttatcagccccaagttcatggctcatgttcaattgaaagtaatgagtattgatatgccctgtgctactgaacgaattagagaggagagaagctcaggatgaccctctcaatacaaagaaagatctcccctgaaatctcactttaagggaagaacccacatgtgcccacccagttttcgcaaaccatgttattatacttcttggagcaggactcgttcctttactgcaaacagaatggcgtggcctttgaatccagattatgccatcccagcagtgggtggtcaaaagggaaaggttttgttcttgtgaatcagaaggaagcaggccaacattttctccccctctgttgtttctgaagcttttaggccactggctcagaatatcgtctagcaataacacgtccaatagcaaaggaaaagcagccgtgacccgtggccgagagcatgcatttcagacaggtgtccggctaattaaaagaaaccccggcccaatttagagaaccccaagatctctgaattccactgtgggttgctgcatgctcagaccctccgatccctgcaaccaggcctgctctcaagccatgtctcagacattggtggttccaaggcagctcagtgccggtttgccttagatgagcttgaatcagttttcgacaaacagctggtatgacggatggtgatacccggaagataaacagcatgccgtgctttataagaatcttgactgctaatttgaagtggaagaaagaggtgccataatgagccagcttctcttgtctaaacgtgggtattgaacctggctgccttggagttgtgtgtattcacttggtatggacattgaccaaaccaggagtcggcgttccagagtgggcgccaggtcttgcctgaatgtgctgtctgcctttcaaaggaaccaggtggtagccacgtggtatggcttctagacctggttctgagacttggctgcaaaatacaattcccaggaggcactttgtcaaaatgttcatgcctgagcaaagtcactagagattctggtttaattggcttggggtgaaacgtggacatgggagttcttagaaagctcttctggtgattctaatgcagaggcagggttgaaaatctctgtgctagactagtgggtcttgaacattttggtctcggaacccttcagaatgtagaaattctgaaagttttaaggaccctaagtgcttttgtttaggtgtgccattagaaattaaaactaagaaaattctaaaatctacatgcagtcatgtatttaaaaatgaaaataaacctattatatactaacatatctagaatgttttcatggaaaaaataacagtatgttcaaaaagttagtgacaagtatggtgtcttagtagctctttgcaaaccactggcttaatacagaagtcactatatgaaaaaggcatgtacacgcccatatttatagcagcacaatttgcaattgcaaaaacatggaaccaacctcagtgcccatcaaccaataagtagataaagaaaatgtgtatatacactgtggaatactgctcagccataaaaaggacaaaataatatcttttgcagaaacctggatggagctggagaccatcattctaagtgaggtaactcaggaatggaaaaccaaatatcatacgttctaacttataagtgaaagctaagctatgaggatgtaaaagcataagagtgatataatgaactttgggtatttaggtagggggaagtctgggagggggatgagggataaaagactatacattgggtacactgtacactgcttgggtgactggtacaccaaaatctctaaagaactcattcatgcaaccaaaaactacctgtaccccaaaaactattgaaatgaaaacaaaaattgtttttaagaaaagacggctagattctaatatctgcttccacattcagtcttgcaatatgttgtttctgttcaaatctatgaagaaaacctgacctcacacagatgtcattggaaaagggaggtatatagtaaaagccctttcagataattgtggatgttctttgatactacaccaaaactcagcaactggtagtttctcaaaggttagttgcaatgtgaaatctgaaaatatataaactttttgtgctccattacattaaaatccactggtctatcttgatatttgaatggatttttttaccattacatgattttattacatctagcacaggtcacttgagaaatattagctcaatgagtcatgtatgcagatcctgcagtgttgacacatccattattcaatattaaagaaatcacatgtgttagtatctctttaactattggaaagctatcaagctcacggtggctgatacaagtttttcaaaattcttgaaagcttgagtttcatcattggcaacaaatactgtcacttattttcttggaagtgacagaattaatttgttcattttccagataatgtctgccaaatagtcaagtttgaataaccatagtttgtctatcagttgttctttcaagtaaaaatggtgctctctgaaaaaaaaaaaaagggcagggaattcagctcacagttcagaagattggcaaaggtgcttttccttgaggcagctgtggaacttccagatggggcagaggtgctctatgtctacctcccacttcatcacaaagaacattgaaaggccagtgctcaaatattgagatttaataaaatgaataactttcaatatgtcatcaagtacattcttgttatttcaaattcataatctctatactttactcgttttcttattgtggtaaaatacatgtaatataaaattttccatcttaattattttatattttatttttttgagatggagtttcactttcattgcctaagctggagtgcaatggtgcagtctcagctcgctgcaacctatgcctcctgggttcaagtgattctcgtgcctcagccttccaagtagctgggattacatgcacctgccaccatgcttggctaacttttgtatttttagtataggtagggtttcaacatgttagccaggctggtcttgaacttctggcctcaggtaatctgcccccctcggcctcccaaaatgctgggagtacaggcatgatccaccgcatctggccccaacttagctatttttaagcctacagtgcaattgcattaagtagatcacgttgctgtgcagccatcaccatcatccatctccagaactgttttcatcttgcaaaaccaaaactctgcattcattaaacaataactatctgttcccctctccccccagcccttggcaaccaccactccactttctgtctctatgaatttgactactctgagtacctcatataagtggaatcatacggtaattgtctttttgtgactggcttatgtcctttagcataatgtcctcaaggttcatccatgatgtagcctgtggcaggattttcttccttttttaaagctgaataatatcccattgtatgcatacactacatcaagtacattcttaagtgaaactggcttttgttttttctgcacatgcatggcagtaaagaatacagtgatgactagtacaggtctgtgctgaggagacaacagttctacccaccctgagtacaaaatggaaaggcaaaccatgtcatattatcacaaaaatagcgttggcttttcagacaccggaaaccatctcagcaaatttacaacctaggttctatgttgcaatttctacttacacagtggattagtccatttccacctgcttataaagacatacccaagactgggtaatttataaagaaaaagaagtttaaaaaaaaaaaaaagaggtttaatggactcacagttccaggtggctggggaggccgcacaatcatgatggaaggtaaaaggcatgtcttacatggcagcagacaagagagagtgaggaccaagtgaaaagggtttccccacataaaaccatcagatctcatgagacttattcactaccatgagaatagtatgggagaaaccacccccaggattcaattgtcttcctctgggtccctcccacaacacgtgggaatgggagctacaattcaagatgagatttgggtggggacacagacaaaccatttcacacagtaaagtagaaagtcttcaaaaaagaaagagaaaacagaaaatgcactcatagtcctaaagcccagaggcagccaccatcagtatatgcgctggtatgttttcttatcaaggccacattcctgaaatgttttgtctttatgatgctgataagcagggaaagggccaaaagacactgtactggacagatattttcattctctctacaagctctagaaaaacagaggacaattaaattcaggactaaaccaacatttggaaatgtgaacgtaattaattccatagaaatatttagggaatatttgtctttcatttttcctccgtaacatcttgatatagggagtgtgagaatccctggctccttacctctaaggtccttgtttctaaaatgtgggtaggccatggtgcagtggctcattcctgtaatctcagcaccttgggagactgggtgggaggatagcttgagcccaggagatcgaggttgcagtaagctgggattgcaccactgcactccagcctggacaatagagcaagactctgtctctaaaaatccaaaaataaataaaatgtgggtaacggtggtctcacactggcccatgggagagggttagtgatataatctccacttagtgccgagtgagaagttggcatagaggagggagctcaccaagtgtccattgtctttcaataaatactaatataagtaacaataatagtaataataatcatagtacctctcagatacttatttgctttatcttattaggaactcacacagcaatgagattcagaggctggcccaactctgtttacttagcagatgagtaaatgaaggttagaaaccctgagagcacagaaagggcccagacacaggaggcaggactgccagtttcaccagggagaggatccctgaaatggatccctgtacctccctgtgatggttaatattgagtgtcaacttgattggatcaaaggatgcaaagtattgtccctgggtatgtctgtgagggttttgccaaaggagattagcatttgagtcagtggactgggaaaggcagactcaccctcaatctgagtgggcacaatctaaacagctgccagtgcagctagaataaagcaggcagaagaaagtggaaagactagactggctaaatcctctggcctccatctttctcccctgctggatgcttcctgcccttgaacattgggctccaggttcctcagctttgggacacagactggcatccttgctcctcagcttgcagatggcctattatgggacctcaccttggggtgaatcatgtgagtcaatactccttaataaactctcacttacatatacatctatcctattagttctgtccctctagagagctctaagacagattttggtaccaggagtggttctagaggaacacaatattaaggatagagttcttaaattggtttgggggtttctggaaaaccctgactaatgcactagggagaagttccctgaaatggatccccgcacctccccacacctccctgctggtgctgtctcactaccacactgcactagttctaccattcatttgaagttcctcctttaaaatgactcactttttttttttacttaaatagtgattgaaaggaaagttatatgactactgtaaaagtaaaacgagcattacttgccacaaagaggcagtaacaacaaatttaaatatatagctatctgaatagagggtgttctccacgtatcactgaaagtcacctggtggcctcccagaagcatgtggtcctgggctctggctctgagtggagcgtggagactctgaaaagccctaagtggatgctcagaacatctacagccatagcaccagctgagcgctattacaaaccagatacaccactcaggatgttctatcatttgtattcctgtgatctaaatacttctccgtccaaactttcagggcggtttctaaatgcacaaatatttataggtgtaaattcaagtgggtggcaggtattgtgtcaggtgggtaaggcatatagaacaggagtaactgagatgattctgccaatcccagagcttggatggagagctgacgatgagaatgcaacccagggacaaggaggagggtgctggcctttggtagcctgcaaaatggaagtctgggtggtctccctcagcacttggcaagaacggtggcccccactggctgggctccagagctgagagtctgtggatctccctgtcccatgagcccttgaaacagagagtggaataagacaagatggtgacaaaggaagtgttaacctgtgctaccctctgcacctgctcccaacagccttacaaaggaacatttaattcccacaaaaaaggaaacagatgttgtcctgttaataaaacaccaatccttaaaatcatcatcctggccaaatgctatggtcctccctaataaacatggatggctctgtgaccggctggattaattaatacccacaggttcctgaccttttcctgggcacatggacagtcagtccccccaagacagatgacccgctggctcgcctctgcctgtgatgtgtgcgtgtccttcttatgcgagagacatgggaccagaatccaagtccccgagcgagcctgctttctgttccagagtaaaataaacataaaaataaaaacaagcctgcctgtcgttgacgttcctcattgcacaacaagcgccttataagaaaatcagtatttgctgattttccaacaatgaaggaaacattgttctcttctaatgaaagggcaagatttcattttctttttttaaagcaataattcccaccccacccctccccaaggaaatggtaatcatgctctctttgtcttacctggttggggaaatagcatcacctgagtcagggtcttgactggagagtcagcaggtccatgcctctgtgaatacatcaggagcaggtggggcctccaggtggggtgtttggaggcccctattcatggacaatcaggaggatcctcaaactaagagaaggaaatacatggagtgttccggtttccatgtacccccacgcttacccttacacctacttccatatacacagggctttcaccagtcgcaggtctagcctcacggtcttgttttctaatttatactaaagtatgaacagccatcccaagcgtaatggggaatagggcagggagggcacacagatagaagtgggcacctcagtttgctgtattagatcacatccatgttccactatcacagcctgaggccacaaaagcaaaacaaaacaaaacaaagcaaaaaacccagtaatgacttgtaccgctcaggaacatcatagaaaatgaaacatgagaatacacaaaatcagctacagaaacaatgaaaaggtacatctggaacgattcgacctggggcagcataaacattgcaattgtttgtagtcaaggtagaaaataaaaacagaaaaatacatgagcgtcatcttagggaaaaaccctccccccgatcttgggtcagtgcagggaggtagtcaaagtgcaggtgggaaagcccagtgtcaaagctgatcataccatccaacagcgacttggctttgatcaactgtatttagtttttctgccttcatttctgtgatggttgattttaggtgtcagcttgatcgggttaaggaactcccagataggtgttaaaacacaacttctgggtgtacatggaagggtgtttgtggaaaagattaacatttaaattgggagaccaagtaaagaaggtcggcccttgcccatgtgggctagcattgtccaatccatagattggctttaaaaggtagatccgatggatcaaaaaggaggatgaaggtgaattctctctctttcttctggagctgggacatctcacttctgctctcagctgtcagagctccaggttctgaggccttcagactttgggactttctccagcagctgcccatattctcaggccttcagattcagattgaatcacaccacaagatttcctgggtctccagcttgcagagggcagatcatgggagttctcagcctccacaatcacgtgagccaactcccataataaatcccctcttagttttctcaaagaatgaaaaacagattaccatttgacccagcaatctcattacggggtacagacccaaaggaaaataaactgttctaccaaaaagacactgcccttgtaggttaatcacagcactgttcacaacggcaaagacatggaatcaacctaagtgcccaccaatggatgactggatgaagaaagtgtggtccatatacacctcagaatactacacagccataaaaaaaataatgtcctttgcagcagcatggatggagctggagactattatcctaggcgaactaacgcagaagcagaaaacaaaatactccatgttatcacttataactgggagataaactgggtacatcataaagatgggaacaacaagcactgagttacaaaagggggatggaaaggagggaaacaaggttgaaaaaaccacctactgggtagtacttattgggtactatgttcactacttgagcaatgggagcattagaagcccaaacctcagcatctcataaaatgtctgtgtaacgaacctgcaaatgtaacctccaaatataaaatttaaaaagtaaaataaatccctatctacctatcatctatctaatccatctgtctattatctatcattgatcatccatccatctatcatctatctgtctatcatctgtctataatctatttatctacctctatttatctatctatccatgcatttatcctattggttctgtttctctggagaatcttcatacagcttcccatctataaagtgggtggaataatagtgcatatctcataggatgttaggaggatttgtggggaaacatcttaaatggaacactatgactttttgctactctatggctatacttgggactactgtaaaataagctcttcgtaactgagaaccaaaactttcaaaacaaacatctgcctttcagggacatgttgggttgagagtccccttttcaactaccacctcctgctcagcttccctctcctgggtgggcatggtatggggcagtgctttgtgggggatcacacaaccctctctgggaagcaattgatggggactgggaggcttaggcatagctcctgcctcctctcccttctaacctgagcactcagacaagtggtttaactgagtacagctcctccttgtctgcactatctgccatctggaaggagataacaagaatatgcaaatatgtggttctaacacctgaccttctaaaccttctggcttctgggtcccagtgaggaccagtcttgacttttacgagttctcagggcaaagacatccacacaaagatagccccatcatgttcaaccaaccctgcccaaagttggagcgccccaccctttaacttactgcttatttactgctatcagtaagcttcttttgttctggctgccaggaagttcaaagaaaaattaagtgttcaactagagcaactatgtaaaccctcatgttaaatgtgtgtattacttctacatgaaagggtttttttttctttcaatacattgttgaaatattctattgactagatgatttttttcaaaggttaagaggcagagaattccccagtggggataatacaattctaaacaagcaggatataggatcacagcggtgaaacacaccagggtttggtctaagagtttctgctcaagagactgatgtttcagtgaatgcctcctactatcacctccactataagctgaaggaataacaggaagaaatgaacaagggcaggtggatcgggagtcagaacaccaaggttctagccatggcgcaccatttggtagctgtgtgaccaccctgtacctcagttatctgatctgaatctgtgaaatgggatataatgggaagaatgaggccaattctccctgggcgtctgagggtctaggattgctacaagggtgacatgaaacaaaggacgccaacatctttcgaacaggatgaggcactaagcttctctgcaacattgtcataaagatgtcatcttccacgcttcccatcataatatcagcaggtgcaccttagaaaagactcactggggaaatctgtaagcaatatcatgcaaaaatccttctccacatttctatttcctcacccatgaagcaaagaagaaaaattcctgacccgtgtccccaagttggtggtggtcaagaaatgatgacaactcatgctgctagtgcccagggatggcagctcacacatttgaccttccttgaaaatgtatgagtaactggaattctcaaccctggttttgaggccaggagtctagggcacagagaacttaagatattaccaaaaggcacatagcaattcatccacaggcagtctggtcttaaagtcaggattttcacggtacttcctctgcggtgaaagagggtgggagttctcaacaggagtgaaggcttctgagctcaaaagaacttctccaggtcagcagtgctttaagcaacccgtgttcctaatgggccctgaggaacccaagtaagacagtggcagggctcactggaaccaggtcaaggggaggtatgcacccactggtaaccaccaggatctgccgtcccccgaggtcgaaggtcagctccacctctttgcactctggtcagatgtaatggaaagacactacagacaccagcagagcccacatgagaacacggatgagtctcccagacagaaggtagagcaaaggcaacattcacagagagagcacatgagaagcggttgcccttaagtataagagcaggtgaaaccagctgcggaggcgtgagaggtttattcatgttctagtcctgaatctcggtgctagttacatgggggggctctgtttatttagctgggtccttacaatcagtgtgtttttccatatgaacataccctttcacacttcaaaataaatatctgacaaaaatgagccacaacggcctcgcgcgatggctcgtgcctgtaatctcagcactttgggaggctgaggcaggcagatcacaagctctggagttcaagaccagcctggctgatatggtgaaaccccatctctactaaaaatacaaaaattagccgcaggcggtggcacacacctgtaatcccagctactcaggtggctgaggcaggagaatctcttaaacctggcaggtggaggttgcagtgagccaagatcgtgccactgcactccagcctgggcgacagagcaagactttgtctaaaaaaaaaaaaaaaaaaaaaaaaaaatgaaatgaaatgaaataaaattaaatgagccacaacttctgggtggaagcaactatgctggcgttcagaggtgcccgctggcatttgctgggaacaccagtcagggccagatttgaatccctaaaataaataaataggtagagacaccaaatgcttccccccaccttggctttcacgggatggactcaacctgcctccttagaagatgcacagacaaatttcagaacaaagaaagcacgggtggaggctgggtgcatattttaagtatcacacagtacaagctgcctgcctcagttgaaattaaataatattcatgtgattggttgatgtccctctgtgagcatggggcagctgggccagagactggtgtgcaccatccggggacatagcaggtgctctagaaacagccaaagaaggaggaggtggataaaggaggattggcccccatggcgccggcagctcctaccctgtgcctggtgttctcccacctcactccctctctctgcctctccctctgtctctgtctgtctctctctctgacactctctgtcttcctatctctttctctgtttgtctatgtctttctgtgtttctgtctgtttttgtcattgtctctttgtttcttgtctctgtgtgtgtgtgtgtctctctatctctcactgtgtctgtctccgtgtatatggctatctctgtctctctgtctctgtctctgtgcttggctgtctctgtctctcggtctgtctgtctgtctgtctctgtctctctatctctgtttctttgtctctctgtttcattgtgtctgtctgcctgtctctctgtgtctgtctctctgtctctgtccctctttctgtctctgtttctctttttctttgtctctctgtctttctcactgtgtctgttggtctctctttctttcacatgggtgtacacccacccttacccacagcctcaggtcacagaggcactaagggattctgtccctcaggctctccaggtgtcttggccataagaaacccaggtgagtctctcagaacagccaggattcagcacacagaagacaatgcttcaagcccttgcccaaggccagacccccaagcacagcaggcatgggccttgcttcagatgacgctgaccttctgggcatccctgaagccccagggacctcagatcccactgtgcaatggggctgcagtggtcaccacgttctttatgtagagctcagacttccggctccatagccacaatcgtggccgcccatctgagcgtatctacagctctagagttcaccaacaccaggttagcaatttccccacatctcatctgaaacctacaagggctgtgcttagcaaagcaatggcagggatgtcactggcactcattgcaagggggaatctgggcatgcccacttctcctgcctcatcgtcgtacccccccatctgctttgagatctgctcctgcagctgtgaccttctgctcccttcttgcaacccctgcaaaaggcagcacttcaccatggctggagggagggctgaggaggcctcagagggtcagcccgactcccagaaacactgaggtcagtagcagcctgccccgccccagccagcagacccctctgcttcctctcccctctgcagtttgcctgttgctacctggattcctggaccctcccgcccccctcagcacccctgtgatcgggtgctccactgcaggatggccaagtttatatgctgtcaggcactttatatcccctataactctgcctcccaagccctcctgtgcatgtgtttaatttttacaatcaggaagaaggatggggagagtgacagcccagacaccttggaggggtgggctccggccctgcctcggaggaacctgcacatgaattccatcagtgaccctaggttgtattttatgcctaacaccccagtggtttttaaatctccttaaacttttgatgactgagataaaggaaaaggaggaggttgtgtaaatatggagccactattggggaagagctgccgggacctcggtagggcaggagtggaggccaccaggtatcggtaatggagccttgcttctagctcccttgctgctcacctgccatgccaacactccctccaccttccagtgggcagaacagtgggagaactcaactaccccacaccgtgatctttccgagacacaccctacctaggatgatggtgatgatgatgacgaccacaaaaagaaggaacacttttttttttattaaatgagaatgaacacatcttttaacatgctggtttttattgatcatcactcacagtctagtaaaaacagtgcccttgttatgcaaatacagctctaaaccgagtccccccagtgccacttccagctggatggcagctcaaaacccctcctgcaagatagttctgcagccacaacaccagagcaattgtctaaaacggcaaatctgcttgtatccctcccctgtgccaaacaacatctccccatcaccctcagtctatactctgtgtccaccctgcctagctccccaccttccaataaaacaacagcagtaactgtaacaggagccaatacttagtgactgattgcgtgctaggtattttacagggattatactgttttctccccataacagtccaataagggaggtacttttattttgctcatttcacaaaccacagggaggaggagaaggctgcctacggtcacactgctggccagtcctgtcctccaggaagccatcccagagggccctagggtatgggctgagtgatgtgaccaacttacactgtgcccacagcattccaggcttttctcttatcacagagatatgttgtagtttaaggtcagcttgtccatattcctccatgggagggagacagatacaccatctgagtcattcttgtgcccccaagacccagaacttggcacacgggagacatccagaaagcttttgaatgcacccatgttggacttaagccaccaggcctttattagctcaggtgggctctagggtgcctctcctggccctgtgagctgttgggctggaccccacaaccagggaggagggtccttggtgatggggattggccttcctctcccccttcctccctacttcatgaagtcttgttcatgcacaccatcaaggtgcttgttaaagcaggacatcacttggggaccctttgtatccattggattccctcgaattccttggccccaggagtaaagtttaaaactgattctgcaaaaggatagccccagttgggcttccgggtgaaacaagtgtaccagacaataaacactttattcccataagaggaggagaggccggagggcccgcaaataccagcgagcttccatgcagacccaggactccaacgaagacggcagatggacccagacagagctgaagcaggactgatagcaatcaataccatccaacttaatttaattcatttgccttgtattgaatatgatcttaatatactaggagacatcagcttctattagagcccaggaaatcatctttgaaaagaggcaaaatggtatcaaatgcataatttgaaaaacattgttttcaacatctttccacttcatttagcattttgaggaattgaggctatatcttgtaactatcaaactgaattaatcaccttgagacctgatagaagataactggaactctaatttcaggctgcttttattcttggaagatagccttttaagtgggaatatgggaattagtgcaaaatcgcttccactgtgcgtaggctgccacactacaatttttcagtagactacagcttgctattaaatatgatagtcactgactacaggtggctactgaacccctggaatgtggtgttctaaactgagacataaaatacacatggatttcaaagacttagttaaaaaactgtgaaatatctaaataatttttataataactacaagttgaaatggcaaatatttttgtatttgtgggactaaataaaatatgtgtgttcactttaattttcacaagtcatttcacctgatttttttcacttatttgttcatctcccagaaaattaaaaattctatatgtggctctcattatatttctgttagacaatgctagtctacacaatgaaatattgtggatgtgtgcccagagtttttttttctttgaaatagtgtatttcctaagaatgcatttacattaagttgtgccaatactgatgtatttgattgtgtttctttattttgattggaatagatagatttatacatagaagaatataatttggaatttggatctctaaaactgtgcccagagtttttaaatgacctgtaaaaatatataggatgtaattttacatgaaagaggcaaggaaatatgtatgtagaggataattaaaaccatgtaaaacatacggatatgtttacatatatgtagacaagaaaagacagaaaggaaattcagctagaatagacatctcagaatgggtggaatgacagttgattataatgatctcttttatgcatttctacacattcctgagagagatttttttgcatttattattaaataaaaataaacattatttttacaaaaatattttccacaaaattagtattgttatgtgtatttttctctgtcttgcttggtatttgctaaagtaaataatttacaatcacacttagattttatttaacccccagtggcatctcgtcacaaaatacaccatttttatgaagaactcattctcgtggaagtccactttttagttagatcacaaaacattttatttaaattaatgttctagtcagcaacagatgatttggtaaaaaaaaaaaaaaaaaaaaaaaaaaattggtgggtggtcactattacaatattacattggaaagagaaattttattatcaaagcttgctcatccaaaattcatttttaatgggctttttgcctgaacaaaaagagaaaaaagagatcctggaaaatatctcatggatttctaacagttagtcttttatatgggctacatttgaagaaataataagaattttctgacctagagaagcacaaatgagaaaatggttctggcctgatcttttcccaatttggttgaccctcaagaagccctgttgcaatgacctccacctggaaaacttgaactccttctgggttgcacaggcccacctgccaatgcatttatccatttatccatccacccatccatccattcatccatctacccatccatccattcatctgtctgtctactcatctgcttgtctgtccaagctcttaggcctgttggaggaacaaggagtccagtgtggctgcaagaggcagtagataaggtcagaaaagtaggcagaacttcacttagatcttataggtggtaaggaatttggactaatctcaatggaaaggtactggacaggttcaagcaggggcgctgatggcatctaatttccgcactgcaacaccactctggctgctgtgtggacaaggaactctatggggatgagaaggaaggcaggaaaccatttaggagactacttcactcatccatgtgagagaagagggcagcctggatgagtcatcactccagaacagacatctctcaggttccactcagggtacacaggctcactcatggctggcattggtttatagccccttctaacacagtgatgtgggaagggcaccccggaatacaacatcatctgcctgaatccttaaaatatttaagcatcccaaatcaccctctaagcaaaaagtcttctttaggttcccagaggttcaattctatgcagtttcgctgcttttcatttacctcgaatggtcccagctggatctggaaacagatgtgtcaacacaatccctactcatgaacgcttcccagccaccgggaaacaggtcatcaattgtaatctccatggaaaacctgattctgtcagagctttgcaaaccccacaggcctgggctatatcagggagcaagttcctgctggcagtaagaacaccagacttccccaaactggaccgactgacactggagagagggtgaacttccccagttctctgaagtcctggcacacttcctgtgctgttaaatcatccccgggtaaacctgaccttccagaatctgtgaaagctagctacttcatgatgaaccacctttctgagtttatcaaccactgttacttttctggctcctacccagccccatctggggagcaatgcagacccagcaatcctggcttctggaagcatttgtcttaaaagagccaatttcctcttgatgtccatgatcagctcagcttccagccaacagaccagatattctctcccatgacccagacccacaggatgctacctgcagtacatgtgaagtgtccctactatgggccactgtcctggaggcatccgcagacctgtccaccattctggccctatggggaaaatgggtggatgccaacacattgagatcatttgcaagtgcacagatacccatgcacacacacattgcttggccagaagttagtttaaggaactggacctctgggaagagtgtggcttgggcagggatattggctgtttacagacagctgctatatgctcagctatgctctgggctgcatcagttggggctgcagaaagacaacagcatagtcctcaactgctgataatttgatgtagagttggggaggttgtcagagggttgacagatagtggagtccatagactatgaagacaaagtggaattcactctggaatttacccactgaggagaccgcccttggagctctgtcctctctgggtaatgatcctgcacaacaccctccacttcaggagctttgtttttcccgcattctttcaatggaaacaatggcttagaggagttctggaacttcctaggtacaatggaattccatcacacatagagtgaggctctagactcaaaaatcctgctgagcctgggcacagaggctcatgcctgtaatcccaaaactttgggaggctgaggcaggctgattgcttgagtccaggagttcgagaccagcctgagcaacatggcgaaaccccatctctaccaaaaatacaaaaaattggccaggcatggtggcatgctcctagtcccagctacttgggaggctgaggtgggaagattgcttgagcttgggaggcggaggttgcagtgagcccaaatcataccatttcattccagcctgggcgacagagcaagaccctgtctcaaaacaaaaacaaaaacaaaaacaaattctgctgagacatgactgctgctgaaaaccacccaaagtgcagcagaaatgattttgtgtagtcagtcttccctaaaagacttcacttgtacaacatggacaggatagattaagagcacatatgcaaaatatgaacccattgtactatgtaaattactcccttttctgacaaccatgtatattttaatttataaatacccatgcattgaagaaacatgaccaactatatagcatttctacaagttgatcaggctcaaaccccatgacccagtttcaaaacgatctagctggaaatttccagcaggaaattattttcttatagtaacttcagaaacattgaacgggcctgaaagtgccctgcctgcctgtccacagtagcaaagctacaaaaaaagcatgcagagagcccctgaatcccgcaccagagacaggatctttaccccccacagtagagaggagaagccaacctgagaacgcaattcggttttttgtttgtttgtttgtttgtttgtttgtttttgagatggagtctcactctgtcacccaagctggaatgcagtggcttgatctcgacacactgcaacctctgcctctggggttcaagtgattttcctgcctcagcctcccgagtagctgggattacaggagcacaccaccacgcccagctaatttttatatttttagtagagtcaggttttcaccaagttagccaggccagtcttgaactcctgacctcaggtgatccacctgctatggcctcccaaagtgctgggattacaggcatcagccacaggggaacgcagttttctatgttaataaactactctgccaccctctgagtgctgtgtcctgagcacattccctcttcttaacgtagttgaggaggtctagaatccttcttttggagtacaggacacatttccgtataactgactccctgactccctgaaacttcttcctgaaggagagttgggctacaaggactccttctcctaaagccagctcctgagagtccaaaacctctaaaaatttctcatccttaccgggtttccttcaagacaccttcagcttaggcttcaggtccaccctgtgacaactttgcactctttttgtcctgccttggggcattgggacctgaaaggcattttctagagccttgttgaagaaggaattgcaagtcaaagctctgacccaagacaaaacccagagatgggtacagcagattcaagcaagttccagcccattcctcagcatggactcattaggcacccacatgtgcggggtcggaggaggtttcaggacaagggtccccctgcgtgaatggagcgacgcctttgacattggcgtccttcctgatggacttggccttggctgctctccatctctagtaggccagggtgggtggaggggcctccctgggacatcacagcccctccccgctgaggagaccacccttggagctctgtcctccctctgtaatgggcctgcctctccctgccaaggttttaaaagcatctgggcacaggtgcgggtgctgccagcctccagggctaataagaggaaactcggcagaggaaaatgaggccgcgtagccacaatgccattatgttttcccagaacgtgcaatgctcccaaataaatgtgtctccagcattatcacaccacaatattcatacggctcattactggttttaattttgcccgttgcttatttactgtctccttccccactttattgccggggtggaagagttattcatccaagcccagcacagaagggccccaaagcggaatttctccagaagccgctggcccagcgctcaggcctcgcaggctccagctcaaacccacacagcatcagaggttcccctaggcggcccttcctgcagctccctgccacgttgactgactgcttttcctgcctggggaatgagccctttctcctttctatgaccaaaagctgtgcggccacctgctacgctggatagatgagcccatgacaccacccagtgattgcctgtgtagtgtgaggtcgatgacacccacacgggccccttcacgtaggcaagccgctgtcatgtgccctctgcaacctgggactcctgcctgctctgctgtgatacagggctagtgcccttcctccctaggcatggctcaggtcccagaagccacactcgtcacaggtggaaggatggcagtgttctctgagctgcatggggaactgagtgtggcattccatccctggagacacctccagaaaggtaaaacccttgaaggaaaggatgcacacaatgacttcataaacatacttttagaaaaaattggaattaatgctttttaactcaaatttgacaagcacagaatggtataaagaagcaaatcactatacctctctgctcatcaacagaaaactcttaaattttggggcttttatatttgatcttcttttacctgtactaaaaaaaaagaaagaaagaaaagaaaaaaaagaaaacaacagaattcagaacataatcttgtcctagaatctcttttttattaaatccctcttccaaaattatgaagtcggcctgtgttttctacaaccagtgttgaaaaacagtgttattagcatgtactatccccttccattatcgtatttttgtccgtaagcgatatattagcataacgaatgttggagagggaaggaaggaaggaaggaaggaaggaaggaaggaaggaaggaaggaaggaaggaaggaaggaatacagtaaagaaggaagaaaagaaacaagaaggaagataaaaagtaaggagagaaggaaggagggagaaaaggaggaagataagaaggaagaatgaaaggcagacaggaaaacagaatgaaggacaggagggagggaggaaggaaagaagggagaaatatttaacaaaagttatatagaaaaacaaaagaaacaaaaaggtttcaaagaaaataaaagacacaacaaaaataggccttcactctcatacatatatcatacgttttcatttctctgtaacttttttcctctcagtgaattatcatggtcatccctttgcgaaaaacagatacaaagcactttcttctctctctctctctctctctcactgcatagtattctttagtcttgacatgctcaatgtattcaatcattctcgtacttatgaacattcagaagatttcttctccctccttcctttaaaaataatgcttttatttccataagttacagccataaagtagaattgctgggttaaaggacatgcatactttaatttcaataaatactctaagactacattcccaaaaggctgaagcaagtcaccatcccactggcaatatatgaagcgcctatatcctggcatctttgtcagcatttaatattatcattcgtatatttttgtcaacttgatggtaaaacgtgttatttcagttttactgtaatttttactttcccattcacaaaggttgagtatgttctcaaaagtttattgacccatttggattttcttttcttgtgaattgtctattgatagtttttgcaaggtttgaaattgggtaacatgtctttttcttcttttgatttgtaaatactctttgcatatgatgcatattaactgttcatctgtcaggcgttgtaaatatttttctcattctgtttaacattatgtcacacacaatttcccacatctgtcaagcctcattgtaaacatgtttaatgcctgcaaaatattcccaagtgggaggatatcgattcaccatcctctagctattgttggacacttagaagtttcttgctctctttatggttttatgaacgattttgtgggaacctctgagcttaaatcttgcccacgttttgtgttatttctataatgcaatttagtacattttgaaaatagttttatttgtaaaagtaaagtcattaaatcaaaaatataagcatttaaaagctgttgatgcatattgtgaaattgcttcttaattgactatttattcttcccctaactccacactcagtctcctttgctggcactgggaattgcatttcttaaaaatgtatgccattgatggcttgaaagagtatcataatattgttttaattgttatccttttttttacctttgaagatcttgatttttaatgtatatgaattctatatgtttgtaggttaaaaatccttagttatatttgtaggaaaaatattcctggttatgatttcaacttatgactttattgacagataagatatttacatcttatagagtcaaatccattggtccactgtaatttttttcataatgttaagcttagtcctctgctagccaagagatcatttcaatatgcactgatgttttctagtttgttgtgtttcaatttctatttgacatttaacattttaatctgttttatctcattttggggtatggtgcaaatataaaatctgcttctttaacctaggtagttttccatcaaattcagtgccatttggaaaatactccttaaatatcaatcccttctaacgaaattgttttggagctctctggtctgcattttagatttgtatacttcttttagtattagtatctaattaatttaaggatttttgcatcataatacattttatctggctttgcaaattctccttcctccaattaatttttggtttaattttattaactggtgcttgtccatctaatttctcctaggtataatttagaaatattttgttccttgcccccacccccacaaaaaaatccttcccacacttcgattaagattacattgaacctcaatctaacttgaagataatttagacattcagtcccctcatttggctgtagctatatttatagctgtctttaactgaaaggtttttttttaatctttatcgttattcgtttctattttcttcaactacattctacaccagtcttctgaaaactttttctgggccaggcgcggtagctcatgactataatcccagcactttgggaggctgaggcagtcagatcacctgaggtcaggagtttgagaccaccttgacaaacatggtgaaaccctgtctctactaaaaaatacaaaaattagccgggcatagtggcgcatacctgcaaccctaactacttaggaggctgaggcaagagcatctcttgaacccaggaggtggaagttgcagtgaggtgagaccatgccactgtactccagcctgggtaacagaacgagactctgtgtcaaaaaaaaaaaaaaggaagaaaaaaagaaaggaaggaagaagggaaggaacaaaggaaggaagaagaaaaagaaaagaaaaactttttctggatgcttatatttgtgatttttaaaattgattattggtggcctggtgtggtggcttacgcctgtaatcccagcactttgggaggcctaggtgggtggatcacaaggtcaagagattgagacaatcctggccaacatggtgataccccgtctctactaaaaatacaaaaattagctgggtgtgatggtgcgtgcctatagtcccagctactagggaggctgaggcaggagaattgcttgaacctgggaggtggaggttgcagtgagctgagatcatgccactccagcctggcaacaaagcgatactctgtctcaaaaaaaaaaaattgattatctgctattaggttaaaaaaggaacttctgcatgtctgttaagagtataattatcatataattataattatagagcattggtgatcacattgatttcattggtgtcgaaaatactaaaattattagtccaattaataatacaattataaataacatcagtaacagtaaaactgtcaccacatctgagattcttttaaaaatagtgttttgcatattcttctaagatgccacagaagtttgtggttagtttttgatttaaaagccttgactcttgacctattaaataggtgaacactttgccagggttttaaattaggaaactttcaaattaggaaccaaatttttctaagactgtagagatttctagtcctctttaaattttctcagaaagagatttctgtgctcattgctgacagaagttgtcacttcactgacgtcatcggtggaattgaggacgaatgtaacactttgtgatctgatggtttccctggacacatttcagccctacaagttgagagaaagtgagtgcccacagtcaggggaggcgcctggtggctgcagccagccttcgtgtgcacaggcgtggagaagacgtcctctccaatgggtaggggaataaagatcgcagttaacagaatcacatagccagcactgcctgagtgctgatcgtgaccagccaatgctctaagggcgtggtgtgcaccatccctgtaatccttttccagctttattgaggtttaatagacaaatagaaattctgtatatttaagatgtatctctgatgttaatataaatatacaatgtgaaatcaccaccacaatcaagataattagcatatctatcacctcacatagttactcttttcctactttattttttttatttgtggtaagaacatttaagatctatatatctacgttgtgcacaatagccaagatatgaaaacaacctaaatgtccatcgatgcatgactggataaagaaattgcaatatatacatacatacatatgtacacacacacacacaatggaatattatgcagctgtttaaaagaaggaaatcctgccatttgcaagaacatagatgtaactggaggacattatgctaagtgaagcaagctagacacagaaagacaaatgttgcatgatttttcttatatgtgaaaactaaaaaaacaaacaaacaaacaaaaaatgttgaatgcatagaaccagagctggggagacgtaggtcaaagggtataaagctgcagtgatgtacgacgaataaatctagatgtctaaatacagcatgaaggctatagttaacaatactctactgtattgaaaactaagacagtagcttttgggtgctcttaccacaaaaaaaggtcaccatgcgagatgatatgtatattaattggcttcactgtagtaaccatctcattaagcaagcatatatcagacatcaccttaagtatacacaattttaaaaaaaaagaagaggagcttgaagcttgctaaggttttgtctgcctaggtacacacaaaacagtaagagacaaatagcaggacttgacactagccactctgcagtctccctcaaaagacacattgcctagttctttttcattttgttgtggatatatatatacacacacatatatatgtgtgcatatatatgtgtgtgtgtagatatatatagatgtgtgtgtagatatatataggtgtgtgtgtatatatgtgtgtgtgtagatatatataggggtgtgtgtatgtagatatatataggggtgtgtgtatatatgtgtgtgtgtagatatatgtaggtgtgtgtgtatatatgtgtgtgtagatatatataggtgtgtgtgtagatatatgtgtgtagatatatatagggctgtgtttgtatgtgtgtgtagatatatataggtgtgtgtgtatatatatatgtgtgtgtaaatatataggtgtgtgtatatatgtgtgtgtgtagatatataggtgtgtgtatacatatatgtgtgtgtatatataggtgtgtgtatatatatgtgtgtgtatatataggtgtgtgtatatatgtgtgtatatatatagatgtgtgtatatatgtgtgtgtgtgtagatatatgtaggtgtgtgtatatatgtgtgtgtgtagatatataggtgtgtgtatatgtgtgtgtgtagatatatataggtgtgtgtatatgtatatatagatatctagatatatgtatctataaatatagatatatataggtgtgtgtatatgtgtgtgtagatatatataggtgtgtgtatatatgtgtgtgtagatatataggtgtgtatatatgtgtgtgtagatatatataggtgtgtgtagatatatataggtgtgtgtagatatatataggtgtgtgtatatatgcgtgtgtagatatatataggtatgcacatatatgtgtgtgtagattatacaggtgtgtgtatatatgtgtgtgtgtatatgtgtgtgtgtgtatatatctattaccaagttatccatgtctacatgctctgttctgtggcattaagcacattcacattgtatacagccatcaccaccatctatatctatgtccagggttttttcatcttcccaaattgaaactccataaccagtaaacaataacttctcatctccgactctacctggcccatggtaaccaccattgtcctttctgtctctatgaatttggctactctatggacatcccataaatggaatcatacatctcataaatggaatacaatcataccttgttcatttgtatctggcttgtttcacttaatatcttcaagagccatccatgtttttgtcagaatgtccttcctctttaaggcagaatcgtatgtcattgtatgtctaccccacattttgcttatctattcatccactggtggacgtctgggctgcttccaccctttggctattgtgccacgcctagttcttgtccatgcgttggcctgatgcttgggagccaacctggtttcttggcagcctctgttccttgtccccacttggcaacatggcatggcccatgcggggaagagctgcgcgatatggggagaagcaaagggtaaaggattccatgcaacaatcactagaggcgcactgatttgttgccaaacagtgtgctaggcccagtagaaccatggagaaagacaaggcaccatttacaggctagtaagatgcgcaaactccagaccataattcaagaaaaaacaaacaaacaaaaaacgctgctgttgaggcactggagagagatggtttaattccacattggagagggttgagtcagaggggcttcatgcaagggtggatcttgatgggagcttgaatgccgattgggatttaataaatagaaatggagggaagagtatttgcctaaaggagactatatgagcaaaaccacaaaactcaaacgtggagaaggtgaagatacgagttcggaggagcacagtagtcctgtttcgttgcgcaggagcacagtcaacttctaacgtcaattacgacctgaacttgggaacttgttaaaaatagcagtcctccccacttcgttcctctttctcttagataaaaccaagtctgcatctattgagaataaaggcagtaggtcagatgaagaagctgtgtctgggaaattatctcgtgaattcaagcaattagagaggaggagaggtggtaaacttctgtaaagctgttttgcaaactaagtcagacattcaagaaagcaggttaatggtgcatccagtgacaacgatgtcagggtatatatagatctatacctgcccgagctcactacagaatattgtcacactctagtggacagcatgttcatgtctgctcagcatctatttccctgtgtttggtaatgccccttggattatccctgtgctttaggtaaggctaatcctacctcactggctcgtagccacaggttatgggttcagggatgaacacgttgatcccggcagggccagtgggactcaagccaagaacttccgttgcaaacgaatgaaaaagataagctgcttttccgtggatttgccaagcttatggaagacaagcttggagctgctgaaggtcaacttgcagaggctactcatgaagaaagccaagaatcagagagagacaggctcctggatccagtcatgcctgaagacacagccctggatgtatcagttatgtaacaaaatataataactcgcaaaattcgtttgtctatctttttatgctggtcagggtatgttttctgtgacagaaggagtcctaattatatatatctattccctgcagaagtatcctttcaaattctatgagcagagccaaggcacaggacagaattggctgcatcagcccaaaagattactcagccaggtatatcagaagcagaattctgatgaaatatgtatgcagataattttaaaatattttttatatatgaatctattttagtctgaatactctcaaggtgtgtacacagtttgagttcaccagataatgtaccaaatccagcttcttcagctgatccactgcttctgttctcaacagacacagactttaatctcatgtaaggggaagaggaggaagtggaaagtacactatctttcagcaagtccccaagccaaggtcacactcacctaagaagttaatcactcattctgcagttaataaatcaccttctgcaaaattttggtaaaagtgtggtttatttaacatatataatagaaattaagaaataaaattatctttatttgcaggtaacataattgtctacatagaaaatctaaggaatatacaaagaagctactagaagtaataagtgagtttaacaatgtcacagaatatatcaataaacaaaataacaactgtatttacatattgtagcaacaaataattggaaattaaagctttataatataatttattgtactaacaatatcaaatatacataaagataaatttaacaaaatatgtgtgggactagtaaacagaaattacaaaacattgcaaaaaaaagacctgacaaaaaatatatactatcttcatagacttattatttttaacttgttagttctccccgagttaagttacaggtttaaaacaatatcaattaaaattctagcaagctttttaaattaatgtaaattgacaaagtgattctaaaatttacttgtgaaggcaaaggccctagaaaagccagaacaattttataaagaacaagtttagaagtgtaagaataccttatctcaaggtttaatacaaagtaacagtaaacattatggtgtggcaggggcaaaggaatagctgtatagatcaataaaacagaaaagaatgtccagatatagcagacccatacatatgtggtcaatttattcttgacaaaagagccaacgtgatttatggggaaagaataatctctcaacaaatgacaattaaacaattggatatgtatatgggggaaaaaatcacaaccctaaaagaacttgaagtggatgatgtacctaagtgtacaaactaaaattaaaaaacttctagaaaaaaaaaaaaagataagtataaaccattgtgaccttgggttaggcaaagaattttaagatacaaaatgtgcaaatcaaaagaaaatattggggcctggtgtggtgtctcacgcctataatcccagcacttttgaaggccaaggtggaaggattgctgcagcccaggagttggagaccagcctaggaaacatagtgagataccatctgtacaaaaaaagggaaaatattgataaaatggatttcatcaaagttaaatactttcaactcttcaaaatatataattttaaaaatgaaaaggcaagtcactggcaaggagaaaatatttccaatatgcaatataagtcttgtggtccagcatggtggctcatacctataataccagcactttgggaggccaaggcaggaagatggcttgaggccaggagtttgagaccaggatgggcaacatagcaagatcctgtctctaaaaaaaaattaaacaaaaaaaagaacttgtatccagaatatgtaaagagctcttagatctcaatgataagaagacaaacaatccaatgaaaaataggcaaaagattgggacaggtacttcccaaagaagatatacgaatggccaataagcacagagaaaaaagcccaacatcgttagtcaacagacaaaggcaaattaaagccacaatgatgtatcacttggcaaaaattaataagactaaaactacaggcataggcaacaaaaaaagcatcaaattagacttcatgaaaactaaaacatttcgtgcatgaaaagaaactatcaacagagtaaagagagatgtgacattgtaagatgtatatttggtctttgacacaatttcctgatacacaacttctaagatccttagaatctcaaaagtgatggtctttttgtatgctaatgattgactggtggctgggggtccctaggaagcttcaggatgggggctggtcactggaaaaaccaaagacaggattagaggagggttaggactttcagtcccacccacattatccagagaggggagaggtgtcgaaggtttgagttggtcacaatggccaatggtcagtggtttaatcaatgcctgtgtattgaagcctccagagaaacccaaaaggacagggatcagggggcttccagttagtggaacacctggaggtttctggaaggtggcatgaccagggaaggcatagaatctctgcacctcttcccctacatcttgccctacacatcttttcatctgcacactttgcaatatcctttacaaaaaataggtaaaagtttccctgatttttgtgagccactctagaaaattagttaaccccaaagaggaagtcatgggagcctcaacttgaatgccatcagtcagaagtttcagaggtccggacttaacaactcgtatctgaagaggaggtagtcttgtgggactgagcctgtgggatctgatgccgtctccaggtcgacggcattggaattgaattagagaacacccagctgtgtccactgcagaatggattgcttgtttggtgtgtggggaaaaacttccacatatttgatgacagaagacttctgtgttgattgatatagggggagagcagaggaagaaacagcttgaggttttctcccctcaaaaggcaatccacataatgggagaaaatacttgcaaattatatatctgataaaagattagtatccctattccacagagaacttctaaaactcaacagcaaaaaccaacctgattaaaaaataagcaaaggaattgaaaaggcatttctccaatgaagatatactaatggccaataagtacatgaaaagatgctcaatatcactaatcattagggaaaggcaaatcaaactacaataagataccaactcacacctgttaggagggatactattaatataacagaaaataagtactggcgaagatgagaaaatggaattcttgtgcactgttcttgggaatgcgaaatggtttagccaatgtggaaaacagtatggtagttcttcaaaagactaaatacagaattaccctattcagattcaacgattccgtttctgagtatataacccaaaagacttgagagcagggtcttaaagagatatttttgcacacccatgtttcgagcagcattattcacaatagctaaaacatgacagcaacccacagtcattgatgaatgaatggataagcaaaatgtggtttatgcctacaatgacttattattcagccttttataaaaggacatctgacacatactacaacatggatgaaccttgagggagttatactaagtgaaataaaccagtcacaaaaagaaaaatactgtataatttcacttcataaggcagaatagtcaaaatcttagaaacagaaggtaaaatggtaattgctggggctggggaaggtgggaatagggagtcgctgtttaataggtacagagtttcagttttgagaaattaaaagagttctcgagatgattggtggtgatggctgcacaaccatatgaatgtgcttagtactactgaatcgtgcacttaaaaatggttaagatggtcaatgttatgttatgaatatttttccacaatgtttgattgaaaatatcaaatgtaggagagaaaggggagtaactggaacccttatttgttgctggtgggatataaaacaatctatttggaaaacagtttcttacaaaattacacatatttgtccagtgtattgaattcagaatattttattgaatatatttacccagcatattaaacacatacctaacatttcccattaaaatgaagacatatgtccacacaaaaatgcttacacacatgtccatagaagctttatttgatggatcaaaatggaaacaacagaaatatccatcaataggtgaatggacaaattgtgttatatccatataatggaatatcactcaattaataaaactgaatgatcctcatgaatcttataatcattatttttggtgacacaaaaggttgcacattgtatgagtccgtttatagaacattctgagaacaaacaaaaagccagggacagtggtgaggagaagaattgaagcaggtggcatgaggacactttttgcagtggtgtgaatattcatatcgcgattgtgttggtggttacagaactgtatatattagtcaaaggccatagtgctcttcatccaaaaaggtgactttttggtacaaaaaagtatatgcaagaaatctgggttttaaaaagagtctcaaaacaagtatatagagaaaatttaaagttttttgggggaaaaatgcaaacctgtgtttctggattaaaaaaaactcaaagatgctcattgttttagtccattttgttgttcttagtccatgttgctataaaggaatacctgagactgggtaatgtacaaagaaaagaggtttctttggcccatggttccgcaggctgtacaaacatggccccagcatctgctcagcttttggtgaagcctcaggaagcttttactcaaggcagaaggtggagggggagcaggtgtgtcttatggtaagagaggaagcaagagagcaaggagcaggtgccaggctcctttaaacaaccagctctcatgtgaacacacagagcgagaactccctcatcatggcggggagagcaccaagccatccatcaggaatccgcccccaatgacctaacacctcccatcaggctccaccttcaacatcagaggtcacatttcaacaagaaatttggacgcacacacatctaagccatatcactaattctttccaaattaacgtattcgacttttgtgattctaaacaaatcttaacagaactttgtgggggacagatgaaacttgacaaaacgattctcaaatttacatgggaaagttaattgcttataatgccagagaaagttgagtaaaataaaataatgagggaaaactatttttttttactccacatacacccgtgtgtagtgatttccaacctgggttatgtgtgcatgtgtgtgtgtgtgtaaatgtgtgtgtgcacataggtgtgtacatttattttgttgtgggcaacagtcacagtttgaagaaaggataaaatggtggttgctaagtcctattgttctttgtttttaaaaataatatagtttttaaattatgcagtaaatgatgaagagattcttttatgcatctgaaaagataaaaaaatgagcttaatttttttaaaagaaagccttctttacccaaagtaactgaattaaataacgggatgaatgtaatttttttacatgtcaggaaataaagtaaatatttacctaaacttgaaatgtaaactaattttaaagaatggtggcaaaaatatgatgcttttcaacctctattctttttgcttctctgcgcacagtgatgtgctcaggcgtcatgctaagcatttgggcagagggttccacaataaaagaagtttttcttttttttttaaatttgcctttctttctatatagaattcaacaatatataaaattataaagaaaaaagtaagaatcctctgaagtctcacacctttgaaataaccattaataacacttggaataagctttttattatagattttctttattcatagaaacatacatatgtgtaaactttgtaaaaatggaataatatcacacgtgctccatgctcaccctttctaacaacccacatatttcttcatactcctataattctatgaacacctatacacaaaattctccaaaattctatttgtatgtgtacatgcatttatatacatgtactctttggaagattttctattatttgatttacaggaatggaatatcttccattctttctgcattttaatttcttgcttaacaataccttatagcagctcctcaaagtcacagagtgtagctcgaatcccttctttgccctggctccatgccattccatactgaaggcatagtcctctctttttggccattttggttggtaagcatttgctctgttttcagttttggggccagtgcaaacgatgctacaataaacctctgtatgcctgtccttatggatttgttctttcagttccatggggtaatttcacaggagggcaattgtagggttggatggtagatatattttttaatgttgaaatgatgttgccagactgcattcccaaaaggttattttcaccagcaacctgtgacaatatctcctttcttcaagcctgtcaatattagtcaatagtacatatttttatttttgaatataaaatatcattattcatctaagtgacatttctttgaccactgttgaattaccttaaatgtcaaaacagtaaaacatttcaatatcaagaattatacagaaatattgacagtgactattggtagcatacatttttcttgaatgtcctaccatagcactgtctggtaaaaatttctgtgatgggccaggtgtggtggctcacacctgtaatcccagcattttgggaggccaaagcaggtggatcacctgaggtcgggggttcgagaccagcctggcaaatgtggcaaaaccctgtctctactcaaagtacaaaaattagccaggtgtggtggtgcacacctgtaatcaaagctactcgggaagctgaaggaggagaatagcttgaacctgggaggtgaaggttgcagtgagccaagatcgcacctctgcactccatactaagggacagaaggagactccatctcaaaaaacaaacaaacaaacagacaaacacatttctgcaatgatgggaatgttccatattctgtgttacccaatatgatagtcactagccacaggcaagtattgagcacttgaaatgtggctattgtgagggattgaatttttattttatttcatttaaattcaaatatccagatgtcccttgtggctactatattggatagtccagttctagaaaatacaagttaaaagattaaaacattgaaatatgcacttatcttttttctgatatatctaaaaatctcatgatattttattaagaaaaaaactactagaaataataagaacttttttcaggtaactacatataagctaaatatacaaaaatcaatagctcctttacttagtactaagcacttggaatataaattaggtaaaagttcatatacactaacaacaaaaatggcaaaatgctaaagaataaatttaatggaaaagctatataacatatccaacacaaattttaaattgtaataaaaagaataaaacaaaaccaaatacctagaaacgtatactatactcttggacaagaagatatattatcatatacatcaattcatctaaaattaacttataaattttatcaattctaactagatttccaagaggttaaaatgatccttgaattcatattgaagaatatacctaaaatgtactaaaaatatataagaataaagtgagtgaggcttaatttatgcactactgttatcttctcaagagccattgtagtaaagttaacatggtgtggacgtaagaagagacaaattggtttatggaaattaattaaaaatctagaatttgatcccagtatatgcaaagttaagagctgacaaatatagagttttacttaatgtgaaaaaatagaccatttaatgaataatgctggcaaaattcattatctttataaaataaaattttaaacttttattccattaccataggcaacaataaatttcaagataaaaggctcagataaaacaaaagaatcttatgataaaaatcagaagacactcatacaatccaggggtcaatgtagtcttcctaaataagaatagaaactcagattcttaaaaattaaagggaggttatatctctcttaatataaatttaaagcatttgtttgacaaaatacacagtaaacgaagtcaacacacaaatgatactgtagaaaataatctttgaaacaaggctaatctccacactgcataataaaaactcaagcaaactaatcagaagaaggcaaacaagccaatttcaaaaagaaaataaggaggaatcatgatgagaaaatttacaaatctaacccagaccctgaacaaaattagagaagatgtacaagtcccctcttgttgacgtcctcgactagctctgcctctcctttgtttctggtgttcgtctacagtttctaggaacataggagaaaaatcatcactgccacagcaacagaatgcagaggaacatatgataggtttcccattattcagattgacaactgcatgtcaaataatcaaaagcaaaagatcagacctgtaattccagtactttaggaggctgaggcaggaggatcgcttgaggacagaagttcaggaccagcctgggcaatatagcaagaccccatccccaaataaaaataaacaaaaattagctgagcatggtggtgcatacctgtagtcccagctactcaggaggctgaggtgagaggatggcttgaggctaggagttggaggttgcagtgatccgtgtgcatgacactgccctgcagcctgggtgacagagcaagagcctgtctcaaaaaaaaaaagaaaaaagaaaaagcaagtcgcttgtttcggatacgcccactgagcagacacaccgccttcaccaggtatttttaattctgtgggccagataaggagggtgaacaccatcttacagcttacaccagagccagatcccctaaatctactacagatgctgcggtctcagagccttggtaaactgggcttcaaaggggcctaaggacctgtcttcctcaacccttgcttggacctgcttgaactccttccctcagcctccctgatgggtgattgtccaacgtccatttgatcatcagccccaattagtaaggaactcactctccccgacaatgtaagaagaaaggctttctcattctgaacccacaattgcttccctccaagttctgtgttctcagacccccaaatctcccagggggttcctgtcatctgcacagcagggatgctttattctatgggaatctttgagcaagtctgaccagtgggataaacgcacgtttggcctcgccttggacagatggccgtggtgagtttccgtaacatgccaacacctcacctgatcctcagaggtggccatctctgggtctcactcagctcctgaactatccaggtcaccacactcacctaagacaaggtagaaaaatcaacttctaagccccaacttagatgcgcttcatcagcgtccctgggctcatcggtccggcgttcgtatttcaaaatgctcccaggtgattctgaccctcagctggttttgaaaagccctagctcagaggagctcaaacccaggcatcttcagaaaactaccaacacactttgattaggattggaaatcccaactttctggctaccgatagtgttaaactgctgatgtttcccatggccctttcttgtttgtaaattacgttctccaaaaccgaatttgagagtcataacagctcatcaagggatgcttcttacctatgaagacagtgagtcactgagccctactgggtgtaacagtttcaggacaccatatgtgcaaatcagccactttctttctctagaacttaacttactcctaccttgaacctaagttctgagtcaacagtcagttccatttttttttttttttttagatggagtttcactcttgttgcccaggctagagtacaatagcgtgatcttggctcactgcaacctcagcctcccaggttcaagcgattctcccgcctcagcatcctgagtagctgggattacaggcgccctccaccacacccggctaattttttgtattttgagtagagatggggtttcagcatgttggccaggctggtctcgaactcccagcctcaggtgattacccacctcagcctcccaaagtgctgggattacaggtgtgagccactgcgcctggccagtcagttcaaatttaaactcagcccattccgatgtctcctctctgtcctccaaccatatgggtggaggaagacaaagcagttttgagctttggtcagcctctgtccatgcacatctgctgagctgagcatgggtcttttctgttctttgctgatatccagttcactaatggatcagcagagatgtgtatacctcccctatggtgcctgacccctggtccttggtgtgctcttgagcacccaccaggatcaggaggccccacaggaaggccagcccacccccacctattctgtaagcacttcttagggctgtggaaaagcagctgcccctcacacctttaggggatggcaggagctgtgaggctcccctctgctgggatcaccttgctcccaggccagggtgtggagccacttggggcctcccacttcacagcttctccttgggaactgagacccagggattctgtgttctcagacccccaaatctcccaggggggtcacctgctcacagatacttaaccgaggagaaggagatggatgccctgtcccttccatgtggctttctctcagttcacccccttttctttggagtgagaagtgggcattggcacagcaaatattctttgcttatttttaggctaaaatgttaaccttcggaagctcaaaaggttaaaataaataataactgcatgtgtctccctttgaattcctgctctaggtgtattccttggggtaggggggagtaaaaagaccatggaaaatgaagaatagaagagattgctaagactagtggttttttttttaaaagaatatcagtagagtgactctagttaacaatactctgtggcatatcttaaaatagctagacaagaataattcaaatgttcccagcataaagaaaagataaatatttaaggtgatggataccccaattatcctgatttgatctttacacattacatgaatgtgtccaattatcacacatatcctgatattatggacatctattttatatcaataaaaataataatgaagtgaatgcttggcattactatccctcaacagggaaatgtttctaaggtctcggggtgagcaaatagcaaaatttgggccagaagtcagggcccccactagtgagccagaagtctgtgggctgtgtcctgtctgtaggaacttagacttcatctccatcttccccctggggaactcctccagagagaggcattgctgacccttcaaagcaccaaagataacaacaagtcttcttccccaagcaggtattccaggtgagtccggggtgtagaagactccctcgaacaaagggtgtcctctcctccttagctcacacaggctgcccaggatgaagactccgtgggagtttgggacctcgaatgggggcttgtttcagttctattgcatggtgaggcaggcttctcatcagagaccttccccctcccccagccgggagactgacaggcatcacaatactgcacgctgggccaggggacagtgagtgacagcactgcttcgagggacgattaattctgcacaaggaggtgttctctcctggctctgccactcacctactttccagcaccaccattgactgacagcgcatgttactcctgacctcacacatcactgggtataattgccgggggctcgttattgtcattaacgtctcctgcatgcacacgggagtgcctttcaccccaactcacgcatcacaatgaaggctgcacctgtggggtgccaaccacaggcctgcagtcctgggcttggcagggacttctggggccagactatggttgtccacagtggcggtgtccgacattccagcaggtctgtgatgcctgtcccactgccaggagtctaagagcctctagtgctgaagagtttgaagagcctacctttgcagtggacccttcttccaacacacaaccaacccagagccgacacacagcagcagctccttagcctgtcataacctgaaatgtgtatattcagaaaactaaagctcagagctccctagggattatctagtcctaatccttctatttcttttctccttttctttttttttttttcctttttttgagaaggagtctcgctctgtcatccaggctggagtgcagtggcacgatctcagctcactgcaacctctgcttccctggttcaagcaattctcctgcctcagcctcccaagtagctggcattacaggtgcccgccaccacgcccggctcatttttgtatttttagtagagatggggtttcaccatgttggtcaggctagtctctaactcctgacctcagataatccacctgccttggcctcccaaagtgctgggattacaggtgtgagccaccgtgcccagcccctaacccttatttttctagatgagaagattaagatccagagaaagctcttaaccagctcaagctcaccaacaattactgatgtggtgaggcaaaatgtgtttgtttgtttttttcctccataagtgcttaacctggatttgcgagtccccggatatattcactacacttaaattttcagtgtagtaatgaaatttttgagtgcttgctatgggccaggtactgtttcttttgttattgcttttatcgttttttaaaatgttgttttccagaaatggctgttgaatatttatttagttgttgctgttttaaaatgcatacaattgccagacacgattttaagtacttaacttttaaaaaatcatttcagtctctagataataattcgatgttaaggccgggcatggtggctcactcctgtaatctcagcactttaggaggctgaggtgggcagatcatgagggcaagagatcgagaccatcctggctaacacggtgaaatcccatctctactaaaaatacaaaaaattagccaagtgtggtggcgggcgcctgtagtcccagctactcaggaggctgaagtaggagaatagcatgaaccagggaggtggagcttgcattgagccaagatagcaccactgcactccagcctgggtgacagagcaagactctctcaagaaaataaataaataaataaaaataaaaataaaaataattctatgttatgcactattctcatttcatactattcatactagtttcctgccatgaaggaactgttcctatattcatctacattctcaaggatatgtgaaacccttgatatgatttttgaaggtgctacatatcaccttttcaaatgctaacctggaaattttctgtctcaaggagctaaaaactgttctccccacattacccacattttcaaattgaacaacacatttctaaatattccatgggtcaaagaggaagatctcaatgaaaattaaagattcataaaattgcaatattgtgagagaaatttatagcagtaaatgtttacattggaaaaaatgaaaagtctcaaatcaacaattgaagtccctatctcaagaaaatgaaaaaaaaagagcaaagtaaacacaaaaccagcaaaagaaagtaaaaaagatccaagaagaaaccaatgaaactgaaaacagaaaaacagcgaagagaaagcataaaacaaaacaactacttctttcaaaaaattattttaatgatcaacctctatcaagactgaccaaaataaaatgagcaaggacacaaaacgtgaatgtcagaaataaaatgggctattactacagatcctgcagccattaaaagggcaagaatagaatactatgaacaacttgactctcataaatttagcaacatagaagaaatggactgattcttcaaaaactgcaaaccacccaaactcaataaagatgaaatagataacccaattagccctataaacattaaataaattaaatttttaattacagatctctttttaaaaagttggtctcactagaaatttctactaaacttttaaagaataattaacaattttacacagtgtttttcagaaaacaaaaaaggaggaagcacttctaaacccattttgatcccctaaaccgcacaaatatggtacaaaataagaaaaactatactctctagctctcatgaacttagttgcaaaaatcctcaacaaaatattagcaaatcaattcaccaacataaaaaattaactagacaacacaaccaagttagatttatttcagatatgcaagattaattcaataatcaaaaattaatcaatgtaatccactgctatgatttggatatggtttatttgtccctaccataactcaagttgaaatttgatcccaaatgcagaggtgttggaaggtgggtcctagtgagaggggtttggatcctggggacagatccctcatgaatggcttggtgctattctcatggtagtgagtgagttctctgagactggattcattctcaaggaaatagattagctactgtgagagtgggttgttatacagccaagatgccctcaggctttgtcccttcacacatttccacttcctctttgaccttcaccatgttttaacccagcacaaaaatccttaccacaagttaagcagatcccagttccaggccctttaatcttcctggaccaaaacatttttaaaaattatgactaggagaggaatctgacatagttgactccatcttgcttctaacctcacaagctgtctttgctcattcctgggcataggccaagctaactatgggaggaatttacctcatagtttaagacaaagatgatcacagtcttttcccaaaactaaccccctcttttcttgaggaccaaaaacacatctttgtaaaactaacaaattggccacaaagttagaattatggtaggaccctaaagtctgttaggaggtaggtatagttaaactctaaccagtcattgttttataatttagcttttcatatctgcttactgctcaggagtcatgtggccagaggacacaagatttgtaacttctccagttgatcctatatattacatcacgattgtaacagctaagattggtgtttaagatatttttcagaccctgcattctgacagaccaactgatgccacctggaccaataacccacaccaagaaactgactcaacttgttttgtcacttccacccaggaaatgactcaatgtaagaagacagctcctaccccctattatttcatctctgacccaaccaatcagtgttccccattccttaggacccctgcctgacaaatcttccttgaaagccctagcctctgaattctcagggaggtggatttgagaaatctctcccatccatccattcggctgccttgtgataattaaactttttccctgctgcaacactgctatctcagtgtattggctttacactgtgaagcaggcaagaagaatccttaaaaaactcacagagccatgagctaaataaacttattgtctttataaataacccagtctcatatattctcatatagcaacacaaaacaactaagacatacaccacattaacaagctaaaaaagaaaaatcacatgatcctatggattgacacagataaagcatttgacaaaattcagctctcattgattaaaaaaattcagaaaaagaggaaaagaagaaaaatccgtctaccttataaaaagtatctacaaaaacctgtggctaacaccatccttatggtggaagatggaatgctcttcttctgaaacagggaacaagggcaagggcttctccctcatcactctcactcaatatagtattggaatttccagccactgcaacaaggcaagaaaaggcatacaaatttaagaggaagaaataaaactccctttttgcaaatgataattgtctacacagaaaatcccaaggaatccacaataatcaaaagtggaattaataagtaagatctgcaaggacacaatatagcaaatcaatcccattcctgcataataacaataaatatgtgtcaaccaacatataaggtgaatataatttataattgttccaaaggaaacaaaatactgcggtataaacttaagctccctctatttcatgtttttgccatgtgacatgcctgctcctgcttcaccttccatcatgagcaaaagggccctgaggcctccccagaagaaaaatagatgatggcgccatacttgcacagcctacagaactgtcaggcaatttaacttcttttcgttataaataaaataaaaataaaacactaagcaaaacatgtacaagatctgaaaactacaaaatgttgatgaaagaattcaaagaaagtctaaataaatgaggagacatgccatgttcatggattgaaagtctaaacacagcaaagatgacaattttccccaaattgattttttaactacataatgggcaaaatatttgagtaggcaccacacaaagataaacgtgtagaaaatgcttaatatcattagtcatcagagaaatgcaaattaaaactacaatgagaagccactacacacttaaaaaaggtggctaaagtaaaaaaaaaaaatgatgatatcaattgccgacaaggagctggagtaactggaattctcataaattgctggtctaaatataaaatgacatgatcactttgggaatcgtttagcattagttctaaatttaaacatatatgtattacattactcagtaatcccactcctaggtatctccatatatctatacataaacctttatgtaagtgtttacagccatgttacttataatttcataaaactgtaattaatccagatgttcatcaattggtgaatagaatcaaatgataatgcatctatgcaatggaatgctactcagcaatgagaaaaaaaataaagaagcagatgaatctcaagtacattgtagtgggcattccatgtgaaaaaaatcaaggcacaagagcaaggcactgtatgatttcttttatgtaaaattatagagaaggccaaattataaccaacagaaaatgaaacagaggtttccaaggcttagggctagggaatgggattgaatttgaagaggtgcaagtgggtgatggaaatgttctatatcatgactgagtagataaatgtatgcgtgactgtgcacgtctaccaaaactcattgaattatgctcttacgtttggtaaattacatgcatgtaaattataactcattaaagctgatatacaatttaaaatttgcataaaatgaagacaaagaaattaaaaaaaaaatctgtacactcttgcacaagttggccgagagagaatggtgcacagaataggcaaattggataatggaggagaaggagataattgaagagcctgagtcacactggccatagtggtccaaaacaaggtaacaggtgtgacccagcccaggcacttcacaaatatttgttgagtgggtgtatgaacagaatggcagaagtctgagaaagaaaaaaaaaatagcctctggcagctggcagctgggagctggactggtgctcttggccatggtggtcttctattaaacatagacattttcaaccaacaccaacatcagaggttgctctgtgaccatgatggagtgagacaaaaacaagactctctctaatcatttctgagtacagaccaaaagaaaagcacagcgcaaaccacatcaaaaccaaacattctctcctctctgcaaatgtgggtgagtgaggttccttttttgatatttagccccacttcatttctcaggcttccagcatgcagatgaagacacgctggcatagaactgcccccgattcctgacagcactcaagccagagcacacctttgatgtgctcccaaataaccagctccaatatcaacctaacacaagttcaagccctgtaagatgtccccacaacacaatctgcctcagtttcccaccatttcccatggtgtgcaggctacaggtggtctccggtggtcttaggctagtcattgttggaatcatcaaaccctatccatgcctcctcggagctctcgttgcttgcatgtgtcctcagactataacattcatgtgaaaagtgccagggtgctggcagtacccacttacccacctacgtagatatcagcatatgagggctgcagcatgttggacccagcagtgagcccaggttaattggttcacgtcattatgttacagcttgggtgtcaccagcaccagcattcttgggggaatccacagctagggacaaacattggtggcctctctgcctcccaaagattggggaacagaggggacagagcagtaaatcaacgaacaggagtgccccttgttggcctgatatatacaaggtttctatgagcttctgggccagtgtattctagtagaaagatgccagattacctgttcaaaataccaagggtctatcccagcaccaaccttatgtcttatatattttacactcctggggagtcactcgcatgaagggtacccctgacaccaacatgtgggaagggggagaggaggggttggtcatgccattcctggacagaacagacagccgtgagaatgcggaaacatccccgctgttggcaggtccttccagagtcaaacctttcaaaagaacactcagacatgttagaaatttaccctccctcactgtggctatatgcaaatatttagctataatgtttcttttaattccataaaaagaaagggaaatgatataaaatggtaccaacctcagtattcaatgttgagagactgattaaattgatacattcagataattaaatactatgcaaatatttaaaatgacagaataatatctgatagaggaagatgtatgtccatgatctacttttcagtgaaaaaatatcagatcataaaataatgcatacaatataatcctgtttcataaaaatagtcatataatatgtgcacatataatatgtgcacatgaaataaatggctggaatcaggtccacatggagagtggttggaaatggtaatttgcatttttttgtttattctgtgtcttcagaaacacatctacaatgaacttatatctttcatatcagaaataatgaaggcttagggttttgcctttgttattggcctgtcgttcagagagtctacatcacaggtgagtttgagcagtgtcagaaatctgatatccagatgggaagaggctgcatttccgacactcagggctccccacagctgctgtttcagacccaaatcactcttacagctcaaccaaaatcctcccactgtctgagattaacgactccacccttcaaggctgagagctggaggaaagattgctaagaacactatatgccaacatgttttcagatacttgcatttctatgtcacctaaacaaagcaatgcttaccaaaaattctcagaatcccagaagcacaaagttgctaaggctgagcaagagtgatgggacatggtcacggtttactggtagagctggcactgctttctcctgtcccaagcccttctccttggaccatgctgctttcctcgtggtgagtgcttccctgtggtttaaccaaggaagaagacgttcctacgagaacaacaaatagattgaatacaggagctgttgggccagggggtatgtggggggcattttccccaaaacttcaagaataaatctccaaaccagtgtctttcagatgcagggatggtgctcaggataggccaagcctgtgtgaaaaccctgcagacagccattctcagggcagttgggctgccctgcactgccaaggtggtcttcccggggccttatgtccacaactgtatgggctccagggctcgcctagtttcatctggttgatttcatttcctctttctttctttccagtgatgaggttggtgaggacagtcttttacccaacccctgcataccggtgactcttatgtgagagacgccggcctaggctactatctcctgggaacagatactaacgaaatgtaatttcactgaggccacaacacatctgagaaggacaaggtgatgtggggccagccatcttcatcctaaggctccggtgcaacatcctgtgtccctggaggcccaatttgacaaacccctgcccaaggtgagcatccatctagcagggggaggcaggcttagcccatccgcatcgccctctagcctgggtccccaagagctaggttgcctgagtcactcgaggagctcagagcacataatcagactctccagagtccaggccctgcaaactatagtttggggacattcaccaggtggttctgatgcacagggaaaatccactccaattgtgcaaatagtgtatgcatggggagccttgaacccaaatcagcttaggcaaagtttacttgacatggcctgggtacttttaaaagaaaaactctggacaaattaaatttaacaggtttaactgagcaaacaatgattcaagaatcgggcaagcctcagaactctattaggtgcagagcaactccagggccgccttgtgattgcgcaacatttatagaaaaaaaaaataaaaaaggaaagtgagctacagaaaacagaagtgaggtacagagactgctccattggttaaaagttggcattgccttcattgaaccttgtttgaacagttggcctgcattcaaggatttgggaatttcacctgtaggggctttgccatggagagagagccgtgtggagcttatagggatacacaggaagatcctggctagacagggagttgctccctggaggtgcctgctaaccccatgccaccccatgatcctgcagcacggggctcctctttgttcagcaagttcatctctaaacacaataaagctgtcagaaaacactcatttctttagagggtgacttactgacatcgttagttgttgcattttcttccccagttgcaaatgaatgtttcttaaaaacagaagccatggatggtgatcctgactcttaatagcagggctgttggtgacgagccatgtgcatcctataaaaacacccacctagtcctccaacagggagatttgccttgtgcaagaatctgcacagaacactgaaggttagaacagcaagtacttcagacacgaataatgcccattagaatactctttttattttcaaaagtatttctttacccatagaaaccctacattccctcctccactttcagcatggctcatcagttcatagcaaagttcaaggcagaaacgaatttttcaatattttgccaatggctgctctacgatagaattggtcatacaggaaacaggggcattttaaaacacaaatatgttggctgggcctagagcagggatctcagttgttcctgcctatgagaaccatcaggaagccccctccacagaggctcagatttcatttttctgatataagccagggcatcatattttttcaaaaaataaaaatacttacaagttttctagtatgcattcaggcttaaggaccactggcccagcataggagacataacaggaagcattaattaagcaaagctgggctgagcacttatgtatcgggcacaatgcttgaaggcaggtgagttttcctatggtggaatcctgaagctcttatgctctgtggccagtactaataccagagcaaaggggaagccatcttgaacaccatctctgtacacactgtttcagcaaagagaagaactaccaacatcttatgttattcaagcaagactcaacccagcctaccagggtagagagaaaatctgcaagtgacaagggaagattggcaaaagagagagatgtaagcacaaagattgtacattttaaaaatctccagtaattccaggatatggacaaatgtacaagctgatagccaaagagcatataaggattttaataccacatttccagttacagctagtgaagcataattgggtactaaattacaatgttaatattcatttgaacaagtaagtgctgtacttggactagtagcatcaggaccccgggagggcagcagaggggctgcttaagtggacagagagcttctctggatgagttttgtcctaggtttggttaaggttggttctcagcagagtcttgagaggttacaacatggattgtggttgatgggatttctcccattgcagtgatgctcaaaggattcggaattaagcaagttaacatacaagtaattacaaactgcagttggtaacacatgctagaaagaaacagagaaaagaaccccaggagaaggccatagtgagaaggcattcaagacggcagatgtgcaatgggggaggaagtcctgaaacctgctgcacaatttttctagcacaaatagaaggaaagggtcttgcttgaggtcgcctattattgcggacttatctatttatacctccatttcctccaaacagagtctgaggtggggctcacctgtcatctgcaagaaaattaaagtcatttcttaaaaggggcaaaagcaaattgaagtaatgaggaggagggagagaggaggttaaaagagagagagagaaagggagagagacaaacacacacattcacacacacacacacacacacacacagccatatgtatttgagttcctttctaaaatccaaatcttacatagagcacaattttccttttgcccatttctcaaggaacttgttgtcttcctgtgcaatttctttgggcttcatacaaaaggtaagattccatattaagtaatactaattagctaggacaatcttgagtatgtaacaaaagcaaatctatcactagctgtgggggaaaaaaatagtcctcatctcccccaaaccccaaaacacataagctcagcattttaactggctgggatgagagccattattttcattaatggagctcatttttattttattgggcttttttactatcagattaaaagcatgtttttattgtagttttttctaacgcaatctgagatgatgtgctcaggatgaatggaatagttattgttttaattattttttcattctgtgattttattttgtttgttccttttatttactactcttaagtttgtcttaataacatggactcggggtgcttggaggcctccagtcatcatccccgcggtggtttgcatttgctaatgaccaaggaacagggaaatcactagcatgcggatgcttttggaactgagtcatggcccagccttcctgttgaggatgcccaggttagggccaagggcatggactcccagggttggagggagcaacacagcagctcccagaagcacctgatgtctttccaggacatttctgtccctgcgtctgctccaggctgtcctggctcactaggtcaaggaaaggctggaagggatctcaagggagggaagtcagcaaaaggacatgttcctcacctacagccacatctctccctgatgcccagttccatatgggatactgtcagaacacacaggttttcacacacagaggcccatagctggacacaggcacgtgttctctgccttgaaaaaaaaaaaggaagaccacaaaggcttcccagcaagtttagatgtcttggggaccctgtgggcctaggagaaccagaaacaagggcagggcagagttgcttacttagaacagaaatcaagtactgctttgggagttagctgtccaggggccaagctgaaacaataccggacactgcaagttactcagaagcccgaccctcagccctgccatttgcaacaacacagatgaatgttatgttaaatgaaattagccagacatagaaagaaagcactggctgggagtggtggctcatgcctgtaatcccagcactttgggaggtggaggcaggcagatcacttgaggccaggagttcaagaccagcctggccaacatggtgaaatcccgtctctacaaaaaatacaaaaattagccgggcctggtggcatgaacctgtaatcccagctactcgggaggctgaggcaagagaattgcttgaacccaggaggcggaggctgcagtgagccaagattgtgctactgcactccagccagggcaatagagcgagactccatctcaaaaaaaaagaaagaaagcactatgtgatgtcacttatacacagagcctaaaaaggtcaaatacacagaggcagagagtggaatgctggttaccaggggcagggagctgggagaacgctggtcttagggtacaaagttgcagcaatgtaggaggtgtaagtccagaaatgtaacgtacagcagggagattacagttactagtagcgtattgtttgctggaaatttgctaagagagatttcaggtgctctcactacacgcccacacacacacaaagggaactaggagaggagacatggatacgttaatttgcttggcgggattaatcattccactaggtctatcagaacttcatgttgtatgccttacatatatgcaatgaaaatattgggcatataaatgcccataattgcctgatcaaggattcatttggggtcacttgtgtgccagtactcacattctctgggcctgttctccactgtgactgaagaaagaatctgtcttcctcacgagaagccttggcctgtgcttgggtttaccacagtccctccctctctctaaagtgtcatcacggactctagttgcctgcctgcaccccatttgcagaaggagtccccaaagtatgctctagtttccaagcctgtttgaattaaaatctggcaaagaactaaagatcacgttactccctgctcaaagggcttcccaacacattcaatataaaatctgaacactgtgtggccccaagaagccctctgtgacccgaccctctcatcgttatcctcatctgctcccatctctgcccagaggcttcacagagaggctgcctgtcattacctgccatgccccccatggctcctgtgccctcacctgtcttcctttctgtcatggctctgtcatccctgactggcattagttatgcttttattgactatctctccacctgagaatgagcacatgagggaaaaaattttgtctgccccttcatcaccaccgtgtctccagcacaacagccctaggtacttggtaggtagtcaaggaatatttggaagatgctagggctctctgtttttgtttttgtttttttgacagagcctccctctgtcgtccaggctagaatgcagtggcatgatctcagctcactgcaacctccatctcccgggttcaagtgattctcctgcctcagcctccccagtagctgggattacaggcctctgccaccatgcctggctaatttttgtatttttagtagagacagggtttcaccatgttggccaggctggtctccaactcctgacctcaggtgatccacctgcctcggcctcccaaagtgctggaaatacaggagtgagccaccgcgccaggcctagggctctcttttcactgctgcatcccctgtactgggaacagtcctgggcatatagtagatggtcagtaaatgcttttcatccagggacaagttgaaaaagcactgggcatgtcaacacccagatttgcataaccaaagactcctttgtttccactcgtgtcccaatggatgaagaaggaatttcaggagtgaaggtgaacctaggactcaggtatctctttccagccctcctcaaacccacagaatactgcggaggtcactttattttgttactgaacaaaggtaagggatataatgctttaaaatccccataaagcctgcttgttaatcaatgttgaatcactaatgcaatttattacatcctttgattcatacatatccatttcacaagacatattctatctataccaacattttacacaaggatcgaaacagaatattgagcacagtttaacaaaatctaggcactaatttctggaaataaattctacttatcaaaaggcattgttcccctaagggaagcaaccactattatctaaagaactgtttttttcataaagataacttggaagaatctaccgtgcctttggagaaaatacccagattcaagttacatacacgaaagacttgtatttatcatgatccaaattcacaacactcaagtgccaaggtcgcatggtctccaggaattctgagtgggagagatgaattcaccatcaataaggactagtatattgtccttgaatattgcacttgtgaattccatattgaataagattctattttgctccagagttttggagttatctgtcattttgaaaattcttgatctaagctcggcagactttggttagttctatttggttctatttggttggttagcaaatataaccaaccatcccttaaaaggtgctgcaggagacaacaaagctgtggatcacgggtttataaaaagaaaatgttcggcactcacaaataattgcacgtcatttggctggcagtatgtggaatgcaagtcagaccttgtagtttaacctcagggttgagctgcatgcagatttctgcattggttcactaggaataatggatgactactgattattattacatattatcaaatgtatattataaaaattatatcattaagtattatataaatataatcacaaagatggcaatggccaaaacttcgtgagtgccttctctctactaaacaacatgctaggccccttacaggcatttttcccttttaacgaccacgcccacagcggtggcaccattattcttactttcagatgaggaacgtgggacagagagaggctaggttgcttgcccaaggggatcactggtgcaaatgaggccccggcagccaaggggaatgaggtgtgaagctacacacagagtgaggggccatggcaaacccaagggctgagctgcggctgctgtggccatatctccacatttcaagagaaccgcacatcctgatttcaatttgcaaacattaaaaacgtgatagacacagatgaaacacagctccaggcccacagccaatcctctgggcaccatttggccaactctacaccctcttcctttgctcctgtgctgtttggatggcttgttttttcctcccccacgaagttgtagagttctgagaacaaggaccgtatctcacacagctttcatctccttccaggtaacaccagtgctggctgggagtatgcgatggtacgctggggacagatggtacccccaaccccaggatccaaatcctgcccagtttgccttcttggacacaggggctcatttggagtctcagcgtccatgtcttgctaccttttacgtagcaactgtgctctaaaatgaagaagcaaagccaggtgactcagtgggcatgggggtgcttgtgactgggggccagagctgcagggtctgtttcaggggcggtggggccctgtcagccacatgctcagacacccagatctaaacaccttgcagtgattatccaggcaaccctgagtctagaatcttccttctccttgcacatcttcttcaccgtaccaatttgaagcaatactgtaaagtggtaccagctcagacacacacacccagaacatggaaacttgtatatacacactcagcacatgaggacatgtgtgcacatacccagaacatgggagtgtgtatatacacacccagaacacgagagcttgtgtgcacacccagaacatgggaacatttgtaaacacacccagaacatgaggactcgtgtgtgtacacccagaatgtgagggtatgtgtgtgcacacccagaacatgggaatgtgtgtatacacagccagaacatgaggacataagtgtgtacacccagaatatgagggtatgtctgtatacactcagaacatgggaatatgtgtattcatacccagaatgtgagaacatgtgcgtgcaaaccaagaacatgagaacatatgtgtgcacacccagaacatgagaacatgtgtgtgcaaaccagaacatgagaacatgtgtgtgcaaaccagaacatgagaacatgtgtgtgcgcacatgaggggctgtctgttcacaccatgtgatggctaattttaggtgtcagctcgacggttaagggataccaggatagctggtatggtaaagcattattttgggtatgtgtgtgaagttgtttctacaagagttaggcgtacgagtcagggagctgagtaaggaagatctgccttctcccaatcaaggcagacaccctccaattggatgagggcccagatagaacaaaaaggccgagacaaggtcagtttgctctccgtctcttctgtgtctggaacacccatcttctcctgaccttggacaccaaaactccacattttccagcctctgaactttgagacttttaccagttcccctaccctctgttcaaaggttttcaggccatgggcctaggactgagctgcaccagcggctgccctggctctccagcttgcagatagcatactgtggaacttctcagctgccataatagtgtgagccaagtcccatagtaaatcccctctcttctatttggctagctatatctatttctatatacatgtatgcctatatctctatatcctatcagttctgtttctccagagaaccctgattcatacatgccagaacatcagaacatgtgtgtctacaccaagaacaaaagaataaagttgttcggcacactcatcttacttcaaagacaggcgttgttggagaaaattcaagatcattggttttgcatttctccagcccagcaatgaggggatgagggaggtactagtccacttgggataactaagaatggattgtcacttttcataatcagggctggctgatgggaggaggcttgctgtggggaaatgagggcaggacggggagcgtggctgtcaagtgccctaccaggctatgagcctctcaaatgtaggggttgcacaagagtgggcttagctcagccagcatctacctgtgaatgatgaaattgacttcgaggctagtgatgggtctgcaatgctgtgttcccattatttgtttattctggttggatctgtccattctgactcatcagagaaaagcaggagatgaacacagggcatattgggcattctgtgtttgagttggtatctcagaccctgctaggctgcaaagcacacacccagggacttgaggggacacccgtaaaggagggcttctctcccatacgctgccactccactgccgagcaagctccagcactaaccaccacctcctgcacacagtaagtccaggatttaatggctgggcttatctcatgcgacgttcccaaggctccatttttcatcaagcaatttttaaagagttttatgaccctgtgaacaataattttttttagtgaaagcagactgaatcgtaagtgatggtaattacaccaaactaattgtagacaaaattagtaagaggtcagatccgtttagttacaaaagaaaatatatgcttggaatacaccttaaatgatctctgggaaattaattcatcatggaaataaaaggaatcttaaatcaacagcgactctctggtaaaacatttgcaaggaataaggtttcctctttagttttggttttgatttgatgcccaggtgtcagcctgcaccaggattgcaacaggacccaggacccaggcgtttacttcagtgcagggaggaccctgcagacatttcccatgactagggttctaactgagtcatctcctttaacttagctcacaagatccttcatggcctgggcccttctactttttttttttctttcgagacagagtcttgctctatcacccaagctggagtgcagtggcatgatctcaggtcactgcaacctctgcctcccggattcaagtgattctcctgcctcagccccctgagtagctgggattacaggcatgtgccacaatgctcacctaatttttgcatttttagtagagacggggtttcaccatgttggccaagctggtcttgaacttctgacctcgtgatccgcctgccttggcctcccaaagtactgggattacaggtgtgagccaccacatctggctgcacttctactccttgtaggtttatttcccaccatactctcactacctgagactacctcagtgcctttgagttaaacaggatattcctcctggaacttttttcctgctatttctctacccatctaaataattgcctctagatcttcaggtgtcacagcccggtgttgtgaaggacagggggattacttgcctcccatatggactgggtgtccctgctctgtcccttacagaacacagagatttcatgctcacaagtgcttttgccactgttcagggacacatacctgctaggggtgggggacccaggacctggtgactgtggggcagacacacacccggcaggctgggcagtcaatacatgcttattataacactgattataaatgcttattcaatgaatgaatgggtccattacctctaagtcactcttcagcagccacatctggctgttcccctctctgctcaaagataaacagtgcctaaaggaaggcacccttagcatatcctcacctctagtaaattccactgccggggtttaaagcgtggtttggaccaccattctgagccaaaacgtcagggaaatattcaaatttagatatgaacggggaagaggaggaggggaagaaaaggaagtggtgaagaggtcagaggaagagggatggggtagccagatggacgcatgaaaaaaccaatccttacaccccagtctacctgagttgcccagccactgaaaggcagggatgcctgaagaccctggcaccaagggaaaaaaactccagcaagtcctcgtgggctctgggtaaagaaaagaggctcccaggaggaaagcccagtcagaattcaagttttggaagagacaagatggcctcaaagattcagatccactctgaaatcttttagcagtagcttcagccaagtagctctaagaaaggccctcagagatacaaaatctaagaaaaatagtcctggcatctaattacaacagtgcagtttgctgcttttatctgtaattggactgtatagtctttcattctaatttactttacatctaaactgtgataatcaagacaagcagaacagaatggtctctgactggctatcctactgacacccgttaatgcctaattataacaactaaattaaagatgtgactgtaaagaggtggaatatcagtttgaagcatttaattctgtgaaaagaagtctagattttaaatcctaagtaagaaaatcaatactatgcctcattatattggtattgctaaacagattaatgaaataaagtattttgttgtgttgcttttcttttttccaatgttctcctgatgcaatgatggtttgtaatgaaggactactgcaggggaggaagtttaaattgagagccaatttatacacagaaattgggagatagctaatctcgtttatagagcagcggctttcttttgatatggttggatttttagataggcatcatgggtctcgacttctgcagtctcgtagaacaaaaataaattcaactcaagctaagcagtggtgctgtctttcctcttcctatgaacagatgtgtcaacggggactgctgtgacagtgtcagcatctatgagcaccagtttgggacaagcatccctgaagctttgtgtgccagtggccttgttgtctatgccaggctaaatgtagccacctgtgaaggtttaagagacacagggaagctgggcaggtgaatggagaatatatgaggtccccaaagccgttcgattggttggaaggtggaggagaagccatggaggagaagccatgagaagcagccacgtttcaagttggacaccaaagcctggaaggagaaggaccaaggtgtgcagagagaagatgtcctgttcctgggaccagggagggcagcatgtgcagggtgatagcagcacgctcccaactcatccagcaacactctaagttacctgtttatttattcattcttactattgcccatcctgactttttcttttttttcttttttctcttgagacagggtctcactctgtcacccaggctggagttatcatggctcactgcagcctccaactcctgggctcaagccgccctcctccatcagcctccagagtagctcggactacaggtgtatgtgatcactcctggctaatttattttattttattttttgtaaagacagtgtctcactatgctgccccagctggtctcgaacttctgggctcaagcaattctctcgcctcagcctccaaaagtgctgggactacaggcacacaccatcatgcctggctattttgtgtgagtgtatgtacagatggggtctcactatgttgcctaggctagactcaaacctctgggctcaagcaatcctcccacctcaacctcccaaagtgctgggattacaagggtgagcagccatgcccggtctcatcctgactttgaagccttggaactcaacatcaattataagaatcaaaaacctaaaaagtggcaaaggctgtgtcaatcaccctgtgggacttccccaaatcccatgctgctgagattcaccagtgcaggtttttgaggaatccaaagaccttgcagaatagactgaccacctggaggaatctctagaaatcacctagaagtgaccttactgaccgctgagttactatgagtgaatgacttggggactatagtgtgccaggccttttctggagctggggacacaaaaatgagccacactgagtcctggccccttggagcttgccatttccaaaccactgggtcacgcaggggtgagagatccagcaggagaaggggagcacaaagccggggccccggacaatggagaaaacttcagctttggtgaatgtatccagaacttcccaattataaaatcaacaacagctgggtgcagtggcttatgcctgtaattccaacattttgggtggctgaagtgggaggatctcttgaggccaggaattcaagactggtctgcgcaacatggtgagaccctgtctccacaaattttttttttttttgagatggagtctcgctctgtcacccaggctggagtgcagtggagcgatgtcagctcactgcaagctctgcctcccgggttcacgccattcacctgcctcagcgtcccagcagctgggactacaggcgcccgccaccacgcccggctaatttttcgtatttttagaagagacaaggtttcacagtgttaggcaggatggtctcgatctcttgaccccgtgatctgcctgctttggcctcccaaagtgctgggattacaggcataagccaccacgcccggcctccacaaaaattttaaaaattagctgagcatggtggttctagcttctcgagaggctgaggcaggaggatcgcaggagcccgggaagtcgagactgcagtgagctgtgatcatgccattgcactgcagcccagaccacaacagagcaagaccctattaaaaaaaaaaaaaaagacattttagttttaaagtctaaattagatctaaatgggcatttttggcgatgagaatttttggctgttgaatgttgcttgtaccaccctctctttggattcctgttgtctttcccaatttcttaagcacatgaagatgtggaggcatgggcagggggtgccctggggaccgtgcatatgggctaagtgatcattgcaggccagagagaggttaccagcccccttagaaaggaatggtgcagctcctgaccctgcagggccagacaggactctaattgctcctttgcttctgggactcggaagacaaaccctgccgtctcccaccaggcccgcctcccagctgcacaaacaaagccaaataaaaactgccagcggccgctggtccccttgcgacagatgtggtgcctctgtgccatcttgtctgttcttaagggtttgtttttattgcaaacagacagatgtggcttgtcccttccatcttgtttacgatgctgcaggaacacctgtggaagaacaggtccctgcagaaatccttgacttccgttcagatggcttgagactaagccagccggctgggcaaccccatctgctaaggattccaggttcctctgcccagggaaacctggagaatcacccacaggataatcccagacacaggagtgtcactacacctatgtgcaccttatgttaacaatgtgtacaccttcattcaaacctgtgcagaggacctacgctgtgtgcgctgcctggccctgcagtctgcactgactgacttgtggttcagcccagcttctcactgcaaaggctgctttcattgcctgacctgtgtccacttagctatagaattcactgcattgagaacccacagccctgacccacgagtgagggccatgaggcttatgaggattgccttattgattctcccggtttcagacaaagtggctcatgacctggtgtggaacagacctgtgtcaccagggtgaattctatgcctaggtgcagagggaaggggaaatgcttgcacagagcccaggcttgggcgatatcctctgctctcagccaagctctgtacaccttcttagaattctgcggctccagccacaccattatagatcgcttgcctagcacttactttatttcattagcacagatgatgggagagcagtgacacaacttgtaactttgtgcaacaactgcctctttgtcttaaccttatgttttcatgccacagcttttgctgtgtaacaaaccacccccaaaactcagcagcttaaaaacagccactatttagttagctcacgactctgtgggtgggctgagtggttcaggcagcctcagctaatcattgctaggctcactcaggcatccaagatcagccggtgagtgggctggtggctagaagaactcagatgccctcagtcatacaactggcagctggcaggccgttggccagggtgacaagggtaatggggccacatacctctcaccaagcaacagcttaaccctggcttctccacatggtgaccacaacaagagagtgaaatagaatgtgcacatgcttttcaagtctgcctgtggtatgttttcagctgccccattggctaaagcaggtcccaaggccaagctcagagtcagtgtgggagcttgatgatgctaagagcttggagagcttagacaccagcaggagggataatttgcctccagttttgcaatccaccacaggatttttttaaaagaaatgtcttattcgttttctagcctcttccatggaatgtttccatcatttatcttcaatgtttagtgtttataaatgaggaagaagttcagttttgtttccctaattaattcacaagtatttagaatgtatctttaaattgcaattgggttaaattttctgcctaagattttcctttttttctacttctactatattggggtcatggaatttgaaattagtcctattctttaggatttttaaagccatgtgtgtgggtgtctgggtgtggaattctcattatcccatggatatttgaagactgttcagttttattgtttgatataactatatagacgcagatatatgtagatttatatttagatagagaatcaaccttgtctgtaatgtttttaaattttatctatgtttattatctgcctgatctgttacattctcagaggagaatgtcacattattgtcatatagtttttgtttgttgttgttgtttttattgttttttgagatggatcctgtcacccaggctggagtgcagtgccacgatcttggctcactgcaacctctgcctcctgggttcaagtgattctcctgcctcagcctcctgagtagctgggattacaggttcccaccatcacatcaggctaatttttttgtatttttgtagagacagggtttcgccatgtttgccaggctggtctcaaactcctgacctcaggtgatccacccgccttggtctcccaaagtgctaggattacaggcttgagccaccgtacccggcctgtcatgttgttttacttaatatatttttgtgccacattgcacaaggaagtaagagttcattaattatataggaattatgttgattcttatatattcttggttaagtaaattttttatcagtataaaacaattgtcagggcacagtggctcacacatataatcccagttctttgggaggccaagatgggaagatcagttaaggctaggagttcgagaccagcctgagctacatagtgggaccccaccctgacaaagaatttaaaaattagccaggcgtagtagagcatgcctgtagtcctagctacttgggaggctgagacaggaggatagcttcagcccaggagttcaaagttacagtcagctatgatcaagccactgcattccagcctgggcaatacagaaataccctcttaaaaataataattaaaaaactcactttatcttccttattcctggtttcacagaattccctatcgtactgtaatgagccaaaaattaataaatccacaatagtgagcatgctcattaactagctcattcatatggtgagtagaattctacattatgctcttcttggagtgaaatgtgttaatgtattttgaaattataaaaatgctgatcttggccgggcatggtggttcatgccagtaatcccagcactttgggaggctgaggtgggaagatcacttgagcccaggagtttgagaccagcctgggaaacacagtgagattcccccatctctataatcaagaaaaataaataaatgaataaataaatagtaagtaataaaaatgctcatctcacttaaaaattacaatgtttattgagataattatagattcacatttagttggaaggaataatacagaatgatcatagatcatatacactcttttcctagtttcccccaatgatagcatcttaaaaaccacagtataatttcacaacctcatactgacattgatacaactcagcaccctcattcagatgtctccagttttacgtacgctcattggtgtgtgtgtgtgtgtgtgtgtgtgtgtgtgtgtgtagttctgtacaacttaatcccatgtgtagttctgtacaacttaatcccatgtgtaggttcatgtattaatatttacaaccacagtcaagatacagaacaccacttggtgaaaacactgtccttcatccattgaatgggttttaagcctttgtaaaaaaaaatatggatcacttcgtgaatttgcatattatctttgtgtagaggccatgttaatcttctttgtattattccaaacttttattatatgcactaccaaactgaggcctgctcatactttttgacttaccaatgccacttgtgtaaataagtttctgaagatgaagttatattctccaggctatttaatgcagtaatacttataatagcaaataaaagaggaaagaggcatgtccaaaaatagtagatagaagaaacgtatttgttatctattgctgtgtaacaaattattccaaagtgtaatgactcaataattccaaagtgtaattccaaagtgtaatgatttattatatcacaatgtatgtgatatctgggtgttgctcttctgggatctctaaatgggggcctctcacaagactgctctcaggtggcagctgaggctggggttttctctgaaggttcaactgaagaagaatctacatccaagctcatttatatggttgttggtaggattcagttccaaaggtctcagttactctctggctgttttaagagtcttccttccatttattgctatgtgggcctctccacattgaagcttacattgtcataacgagcgagacaagagagtgcaagagactgctagcagtgtttcataatctaatcatagaagtgatttcccattcatttttctgtgttctactcattagaagcaagttgctaggtccagcccctactcaagaggaagggattccatacaagtgggaataccaggaggtgagatttgggggatctatgttggaagcttcttattataataagtaaattattacacattcatactattacatactatgcaaacattgaattttcttcaataattacattgggtatagggcatgttgtcataagaaatgaaaagagcttctgtaacttggaactcaatatcaagtattctaaaatatgtgaaacataaatcccaaaagaagatgaggaaaatagtgtacagataaaaatatttgaggaaataatgactgaaaatatctcaaattaagtcaaaaatacaaaacctcagatccaagagctcaatgatcctccaggaggataaaaatcaaagtaaatcacaccaatgaacattatattctaattgctggaaattcatgataaagaggaaaaacattaaacaaaccagagtgctatggtttggttgtctgtttcctccaaacctcatgttgaaatttgattcacagtgttggaggtggggctaatgggaggtgttcaggtcatgggagcaaattcctcatgaattgattaatgccctttctcaagggtgagagaattctacctctaataggtccttaaagaactggttgttaaaaagagcccagcacctcctctctcctttgcttcccctctccccacaggatcttggctcccctctgccttctgccagaaatggaagcagcctgagtccctcatcagatacagatgcccagtcttgaactttccagacaccaataattccaaagtgtaattccaaagccaaataaacctcttttctttataaattacccaacatcaggtattcctttagagcaacacaaaatgggataagacacagagggggaaaagactcttacttatagaaaaacaaagataagcataatagcttctctctcatcggagatattgcaagccagagacaatggaataacacctttaaaatgctgaaagaaaatcctgtcaacctagaagcatacatccagtgaaaatacccctcaaaatggaaagaaaaataaagactttttagatgaacaaaagtaagaaaataatcacaagttgatctgttacacagaaatgtttaagatacttcttcaggctgaaaggaactgatagaagattgcaacatgaaggaataagtctacatgaaagaataaaagacctagaaatggcaaatatatggattaaatatgaaatactttttccttatttcttaattccttaaactacatttgattattagaagaaagaaaataacattgtatggtgacattttaacatatgtgaaagtaaaatgtatgacgatcataatagaaagaatgagatggtgattacagaaagtacacaaagctactaaaactaacaaagagatttagccaagggaaaaataaaatgctagaaattatcaatccaaaagtggaaaaaaggagcaataagcaaatagaaaataaatataatggtagatttaaagccagccatgccaataataatataaaatgttgttaatgttaacactaaaaatataaaagcaagcaatatgctaagtgtctacaagaaatactctttaaatatagagaagtagggaaaagtaaaaggaggtaaaaaggcatgtaaacaatatgcatgaaaaagaaaatacagctatattataagcaaagtagacttcaagacaaagaatattcataaagacaaagacagatattttatactgataaagtatcaattaatcaagaagacataacaatcctaaatgaatcaacatataaacagttattcaaaatacattaggcaaatttaacaaaactactggaagaaatagacaaatttacaattataactgaagactttattcttgccccggtggttaagaaaacaaatagacaaaacaactgtaaggaaaaagaatatctgaatattatcaaacaatttaacctattgagctgtatatatccaagaaaacatacatatttgtttcaagtgcacatggaacattctccaagacagaccatctgttaagaaattaaagaagacacaataaatgttatgcattgaaattacatagtattttctctatgatgaaattaaatagagttaaaatagaagttaacaaatataaaatatgtttttttaaaacactactgtgttggaaagttaaacaaaatcttccaagtatgccatgaattttaaaaagtgcaaggtaaattttaaaatatcttaaatgaaatagtaataaatttataatattttaaaatttatgagatacatataaggtagaacttgaagtaattttatacctttaattgcttatattagaaacacagaaaggtttcaaaataaaaaatttaatcttgcaatctcaaaggctagaaaaatgacaaattcaataaaatgttaacagaagtaaggaaataataaagataacgaaggtaatcaataaagtagattatttctttgaaatggtaaataaaactagcaagactgaccaaggaaaaacacaaacacatattcaataccaaaaataaaataggagacattactacagattctacagacattaaaaggctaatacagggatagtatgccaagaaatttgacaattttgatgaaatttgacaatttggattaaaatatattagaaatgcacaattattcaagcatatccaagaaaaagaggaaacataattagttttatatgtagtaatgaaattaaattcaccagtataaccttctcacgattaaaaccttttcagatgacttcactgataagttctcttgtgtatttatagaacaaatgatacaaattattcacaaactttttcagagagtagaagaggagaaaatattttccatgtcattttatagagccagcaaaagccttataccaaaattagactgcacaagaaaagaacactgggccaggcatggtggctcatgtctgtaatcccagcactttgggaggctgaggcgggtggatcatgaggtaggagattgagaccatcctggctaacatgatgaaaccctgtctctactaaaaatacaaaaaattagccaggcatggtggcacgtgcctgtagtcccagctactcaggaggctaaggctggagaatcgcttgaacccgggagacagaggttgcagtgagtggggatcacaccgctgcactccagccagggcaatggagcaagactctgtaaaaaaaaaaaaaaacactacagataaatatccctcattaacatagatgataaaattttgtactaagtactataatatttaatttaccaacatatgaaaacaataatacatctcaaataaatgagattatcccccaaatacagggctgttataacattttggtgtgtaattcactacattaaaaaatgaagcagaagtactataagattatctcagtagatccagaagaaaaacctttgataaaattcagcacctccacttttcatcaaaatagaagtagtaggaaacttcctaaatttggtcatgggcttcggcagaactcccaactaacaaagttacttcaagttagacaattgatagattttcagctaatcaagagaaaggcaaggatgtttcttctccttgtactgaaattcccagtcacttttatatatgaagaaaatcctaaggaaattacaaagagaacaatattacctggactaatacatgaatttagcaatgtcacaatatacactgtaaataatacaaataaattgtatttctatataatagctgtaaaaattagattatacaatttaaaaaccatactcaatagacataaagtacttagagataaatttagcgatagatgtacaagaaatttacatgaaaaacaacatataatctctaagagaaattttaaaatatctaaataaagatctgtacctacttcatgaattgaaattctcaatacttccaagatgtcatttcttcccaaattgatctattgattcaattccatgccaagcaaaatccaacaagccttttttaaaaagaaattgaaaagctgtttctacaatttatgtaaaaatatatctagtagagccaaagcaatttttaaaaagaagaacaaaggctttcaagatttttttgtaaagtaataatagaaaaggtactatggtttctgtataaggagagacaaaaaaatcaatgagacacagcaaagaatctagaaatagattcaaatctatagggtcaataaatgtttgacaaaggcactgaagtaattcttattgcaataatagtcttttcaacaaaacattctgaaacatctcaatatctgtaaggaaaaaaataatattttactgctgtcctccatcacagacaataattaattcaaagtaaactacagacctaaacctaaaagctaaaactacaaagctcctagaagaaaacataagagagtattttcatgacttcaaggcaggcaaagatttctcaggggggaaaaaaaacaccaaaagcatttaacagaaaaacaaatgaactccatcaaaatttaaaacgtccacttatcacaggatattgataaataaatgaatgggataaccaaagacaaggagaacgtcaaatgtgtcaaatggcttatatttagaatataaagaagtcctactcaataataagatagagcaaaagatttgaacatgtatttcacaaagaaagatacaggaatggccagtttcatcaggcgcatatacattaatgagacaccacttcaaaccttagaatggctacaattaaaaggagtgaccataccaaatgttgagaatgaggagcacctggaattctcatacactgacggtggtagagtaaaatggcatagccattttggacactactagggctgtttcttataaaattacacatacacataccccatgacccaggtttgtattccttgacatttatctaagagaaattaaactatatgtccctcaaaattttgcacagcaatgttaatagaagcagcaactacaacaaaaaaggaagcaacccaaacatcaatcaacaatagaacagacaaataaattgtggtattttcatacaatgtgtactactcagtgattaaaaaaagatactaatacatccaaaatatggaagaatttcaaaaccgtcattcttactagagaagacagacaaaataatgcatactgtatgattccatttatgtgactgttttaaaacagatatgatgaatctatcatgataaaaatcagaactatggttttctctgaagagagaggctaagaatgtactgagaagggacatgaaagaactttctggagtgtggaaatggactatatcttaacacggatgtgtgtcactctagtgtgcatatttttcaaaactgatcaaactgtatatttaagatctatgcatttcactgtacgttaattatagagcaatacaaattttaaaatcttaactgataatcccgtctctttttggcaaactcctgctcattaattgtagtcctcaaaatgaaccctttcccccagccccaaaaactcattttgcagctgctatcctgccaagagaatgaaatggcaaactccagtctaatgtactttcatatgcattttttttcttcaaacacattctcttgcacctgcaacattgcactatataaaaagaatagataagaaaaccagatggaatctcatccaaatttattactaaagatagttcccaagtgaatggcagtaccacctctccttcatagccaggcagacatagcagttcaaacatttctttctgagtagtgtaaacacttctctggtttgaaagtttattaagttttcattaaattttgatattgtcctggctgcaagtgctagctggttcatacacttgaaagagcaaatgctcaaactgttcactatatttggtcggcaaaggtccctcccatttttccctcaagcccagtcaaaatcctctctggagtctcaaacttacagaaccctagacagagaaatctctaagcaaggggctattataagcatctcaagaaactcactacctttaacactgcaaccatttgcaccagtaacatcaaggtttgagcctcttcaaatcaaattttccaaccatgttgatcaataatttaaaaagactggaaaaatctatttctaaaatctgtttaaaatgttcctgggtacatgtgcaggacttgcaggttttttatacaggtaaaacatgtgccagggtcgtttgtttcacctatcaacccatcacccaggtattaagcccagcatgcattagctcttttccctaatgctctccccctgcccctgccaacaggcttcagtgtgtgttgttcccctccctgtgtccatgtgaacttattgttcagttctcacttaaaagtgagaacatgcagtgtttggttttctgttcctgcatcagtttgctgaggatgatagcttccagcttcatcaatgttcctgcaaagcacatgatctcgttccttttatgactgcatagtattccatggtgtatatgtgccacattttctttatccagtctatcattgatgggcatttgtgttgattccatgtctttgctattgtgaatagttctgcaatgaacatacacacaaccccagtaaaatgtgggcaagggaaataaacaaacacttctcaaaagaagacatacatgcagccagcaaacatacaaaaaaaagctcaacatcactgatcattagagaaatgcaaatcaaaaccacaatgagataccacctcatgctagtcggagcggtgataattaaaaagtcaagaaacaacagatgctggtgaggtggtggagaaataggaacgcttttacactgctggtgagaatgtaaattagttgatttctaaatttttaagcaggatacgtaaaatgcaaccaataatgttcagcttctggtggaattctcagaaaattccattccttattctccaaagaaaaacatgtttgtagcccctctcaatccaccttagtagatccagaagtcctaacacccccaaactctaatactagttgaatgcaaattattaatttcacagtaaaaccaatatgaagatggtaataaaaagaagtcattatgttctctcagatacattctttccatgcttacaactaatatctgtctcctgagaatctgttagcttgcatcaattcttgccactttgaaatgaattagggaccagtatattgggattggcaaaagagagaattcctgaagactggcaagcacactcctaccacctccttcttgaaaccactccaaccccagctctttatctgattgtgttagggaggctaggtctgatccaacatggaatgtcacgatgtgatgggagtcaggaaatctgtctcaactctgccactgtgtaaccatgggtaagccctttgttttcactcccccacattgccttatctgacaatctctcatttgtcttggctaagaattataggaatcattttgtgtaaagattcctgaaaatataaaccaaccatggggaccctccttaacattccatcatcaaactttcaaacatactgcatctgttcccatcttccatttttccttcctgttgcagtgagcaactcttcttgcacctaaggccaactaatccacctacacttgggatctcggccttttctgtcttctaagacagtggttcttaatcctggctgcacatgtgaatcacctagtgagcttctattgaacacacacacacacacacgcacacacacacacataccccatgccccaacctgcctccagaaaggaactgtgggggataggaatagaatcttggacatcaacattttttcaaagttctccaggaaatttgaatgcacaaccagagttgagaaaatctaatctagaaaaattgtgcaatccattattgtttctgtgggcactggttccttcccattcccaccatgcatttagaacacaattaagtcccctactacaaaagttcctccctaagtccctccacccctctctgactatcacccaattgtctcctcacaatatattgccatttgtacttgtttcattcgattttcttaaaccttaaacctgtggtcatttttgtcacctacttctttctcacttccataaaatccataaactctatccaaggtatttcttgaatatactcctttttctccactttcattgccttctcttcagttcaaaccatcaacttttctccatgacttgctgtagctagtggcctccatctaggttttcctctatccacttggtctgaaccacatcctcacgcatacatcacagagcaccagagaaacttcacagtggcacaacccacatcatgagtttctttcacatttcaactcttgtaatgcttctgtacattcaaagacatcattaagaagtgaatagataagctatagactggaagaatatattacaacaacaacacacacacacaaaacacaatacacacccacaaaacacaatacatgcaacacacacacacacacacacacacacacatttgtatctggatacaaataattaggtccagaatattttaatagtgtttagaaattctaaaagagaaagcaatgagaccaatagaaaaaaaatgcaaagcagccatttacaaaaatggccttgtattaatcagagaaatgcaatttgaaaccataacgacacaccaattccctcctccaaaatgggatgatattagagagcctggcaatatcaagcattggaaataggaattaaaataggcagctggaggttatacaaatagatacaaccactctgcagaacaattaaatttaaaaacatgcataccctgtaacccaacatctctactcctaacttttcaactaagaaaaatttgtacatatatatataaatatgtagctatgagaatgtttatggcagtatgacttatagtagcaaagaaaaaaagagatgcttatagagtcatcaaaggagaataacaattcctgcaatggaatactatgtagcagtgaaaatgaatggctcacagaaaaggaaatcattgagattgaatctaataaacatgatgtagagcaggtgcaagtgacataagatatcagacagtgtgatcatttcataaagcctaaaggaaataaaaatactgtatttgcctagagatgtgtacatattatcaaagctttcacgaaaaggagtgtgaagttaggacttaagtacagatcgtttatttgggaggtgatcccagaaaacaactgtaggggagaggagaagcgacagggaagggaaagcagccaataagaagtgtgctacttagccagctagtcgttggcacttaatcctgcagggaaattctatgtcctgtgatagctcatcagagtggggagagacctggggtatttatacaccaactccggtccacctttttctgaaagctgcagaggaggaggaattaacccctagcacttctagtctcacacagtggtggccaagtaacctctggtggccagagaaagccctcaggcaaaacaacaaaaacaaaaataaattactagttgatccctaatgcactaaaatgaaaaaggtgaggaaatgtgggtggagctcttgacagcagctgccatatataatgagctaagagcatacaaacaagcagaagaatgagaatgccatatccagaatagattaattttgagagctaagaagggggtttaaccaaggagaaatacatcagtgtaactacttttattttgttttatttcttaggcttttagatgggtagctgtaggaaacagcctgaagcctggattgagtaaacagtcccttatccacaaaggtgaggtcagggtattggaagaccacagggatagtggtggatttaaacactggctgggcgcaaggggaaagggcagagagaagttgcagaaacccagaaccagaaataaataccgcttcactctccttgcatcctccagtctcctttgatcacaccaagcaagaagccagaggtggccagaggagtcacccttccaggcacagagtgggtgggaaggtggagagttgacctggaggcaaagagaaggtgatgagcacagttggtgtgagttgttttttatatatatataaattttatttatttatatatatattttttatttatatatatattttatatatatattttatatatatatattttatatatatattttatatatattttatatatatattttatatatattttatatatatatattttatatatattttatatatatatattttatatatattttatatatatattttatatatatataaattttatatatatatttatttatatatatattttatttatatatatatggaagtattatatatatatggaagtattctatatatatatatggaagtattctatatatatatatatggaagtattctatatatatatatatatggaagtattctatatatatatatatatatatatatatatatatatatatatatatatatggaagtattccatatatatatatatagaatacttccagtatagctgaaaacatttaagaaatatctccctaatggcattagattgccttggtgttagatcgctttggtgttagaacaccaaaacctaatatggccatctggtccgcctcccaccccattctgtagcccctgctagggccacctccatggtgcacttttgtcacttgcctccttgtggccctgtgatcctccatcctttcctgtcctcagggtttccgcagatgcatctcctctggcattaaatacttttctccccttgcctttgctcagccaacccttatttaactctaaggctcccatttaaatatttcactccaaagaagctctccctgataccccagaccacagaagtccatctggtgcatacattctgtatgtgttattctccctgctaattacactttaatagcttatttatgatatcatcagcaccggcaccacacgctcaatagccacgatctctttgggttctgaggacacagacaaaataagaatctggactttttccgtcacatagcctctgttaccccagtggaggctcacccccttttcaaggctcactgagaaacagaaaatgacaacgattttggaaaccccagtattaaaatatcttctccaggtttcttacctcatccttgcaacatggtgatgctcatttaaccccagggccttagctccttgtaaaatccatgcctaacacccacgcacaaaaaatgcagcatggagcttggaaggtctttaggaggaggtttgagaaaccctagtgctcgaggaatttcaaatccatctccatgattcaatgatataaattctgaatttttctttctgaaatttaagatctctgatagaagatgactgtaacataagtgatgggccaggcgcggtggctcacacctgtaattccagcactttgggagactgaggcagctgaatcacttgaggccaggagttcaaaataacactggccaacatggtgaaaccctatctctacaaaaaatacaaaaaaaattagccaggtctggtgggctcatgcctgtagacccagctactggggaggctgaggcaggagactcgtttgaacccgggaagtggaagttgcagagagctaagatcacgtcactgcactccagcctgagagacagggtgagactctttctcaaaataatagtaataataaacaaatgaataaaaaagacagaactggagaagccaagcattcccagccctctgatgagctaggtccacaatgggtcaccaggtcacccccaggcaggcaggtatccctcgtggccacacctgaagaaacagtggagcccaggctattgtctggagcaaatcacagacacaggactgggaaaggacctaactagaaccaaatccatgcccatgtaaataggaatatcattaaatatataaagaaacatgtaacatataaatagaggcatcaacatatatgtaaataaaaattagaatagaaatgtttatagatacaacagtctagggctgtgtgccattctatagcagtgtttttctacataggaggaaagcaaacatatatacatatacatgaacctttacatagacatgtatatgtgtgtgtgtatatataacgtatatattcatatttaaatagatactgttaattatttataggtatatataaatacctatacatatagaaataacatacatacatataaatgtctacttgagatatacacaccacagcgtggtgttatgctggtatgtgccaacctctcacacctggcaaggccactctgctcaatggtgtctcttgagagggcagggtcggccggcctctccctgggggaaaggcccaccttcctttgttctgctgtcttccaagttcctccacctttgcatgcagagtgaacaggtggtgccagtctgtaggcaagagccactgcaggcctggaccggggtgtaaacatgatgtggagccacagcaactgagcgtccaccaatcaccaagctgggcaagaacacgcagtgacaatgccctctgccctcccgcaccctccccagacttctgtgagtgtcaatgtcaagactccacaccaaacattttatgctgagtctggaagttggcagtttgcttttattcacaaccctgggcaaacctgtgcaggagatataatcattttcccaaaccaagggtgaggtatgtatctcaggagagctaagttggtggcctcctccacagaggacctcatataggtccacctttgagttttgggtgctgttataaaccaggtaagtctcttccctagcatcacatggttattaacgggcagagttagcattaaccctggtatgatcccaaaaatcccatgccttctgctgtagcaagactgcccggagtgagtgtggcccctgggtgcgacccccaacccaccctccccattgccaggcaaccttcatcccctgagagtccctccacccaacagaccccctgctccataaagatgcaaggtggctcccaagcgctccctctggggagctcagtcctggcctcacctttccagacatggagcaatttctctctgagacaggcagggaacataatgaatgaacaagaccttaaggaaaaaagagagcaaatcatatttttctttcttttgagataaaaataatatgcctgcacatcagatctcctgtgacagagctaatatccaggagcaaaatcagaaaaagcatcctcctcttgctaataatgtgaacataacaacgggctcctctgacgaccacagtgccacaaaagtccctgtcaagccatagtctgcaatgagacctatgagagttcaagaggaaagtcttccctttgcttcactttatccctattcgctaagtacagccagaaaataaccgtaaaaattaacctaaagcttaatggcttatgtaagaatgccttaataaaaatatgttggcaaggttattgaactatacaattaaacccctcccactcgatacttttcagtctaatttctatctaaagcttattcagcaaacccaaatgccaatgctctccttcaatttccacttctttgaacctgctaatttacgaataagaaaggatttatttgtgttattagccacatgtaaccgcttgttgaaaaagtacttttaaatactgaaatcctgagatgcctcgagattcaccaaatatctgaaggatgactttgattttttttttcttccacaagctgtgtttgatttacatcaattaggccctccacataaggtatcatataacaggaaggctaataacccagaaataacctcattaaaagagacagcatatcggtctaaacagaatgaactctaagcagaaaaattagtgacctggaaagtagcagggagaggtaatggcagtaccaagaaaaaatacatccccgttagcaagtcaaaggagaaatcaccagcaataatgtaagaatacaatagaggcagaagcagaacatttttgtaatgtttttaatctgttcaaatcctggaacatgcaatttatttttcacctggtcaaaaatactctctgaaatcatgcatgtattccttgtagactcaggcacacaaaagggaccctcgcaccagcctgtccctaagtgggatgtgttgactgtgtctctaaggtcagctggtttccagggctctgaattttcccaccatcgtgaacactttctcagatgggtgagcccctcttggactgccacccacctgataccagcttatgccaggaatttttctccttgacataaagatgcaatctgctctatcttatggcacagcccatcagaaacacaaagctccccttctgcaactccttgttgactccaagttcccccctcccaccaaattcccattttgtgggcgttttgtaaatgcatggtttgccaagaaatgactgtttctacgaagcctcgtgcatgtggtgttttttgtttgtttgtttttgtttttgttttttaaaaaaagaacaagaaggtggtcacatcagagggaagccatttctaatggtaaaatgcagcagaaagaggaaatataggtgttgcccccagctccctggacctgaagagtctggtgcatcatgggagatcctggaagactgtattcaaatgctgctcagctcctgagtcaacagagtgatgcttaattaaagaaatagagataagctttaaatgtgtgtaagtgtttttacagagcacattaagacagggattgtagtggagtccctgagaacctcctgattcactcttatctgaatttcccatgggccattcctgggcaggtcaagccagcagataaaattcacttctccggggaccctggcttttgaggaattccccagcagcagggcatacgggagcccaagaccttgcacaaccccagaagaggatcagaaagtaggaggccagagcctaggagacctcgggaagaggctgaggcctcagcctcaaatgaccaatgctggggccacctccagggctttggggctcggggccaattccagtcatgcaatctgcatcattcatctcctgccccattcctacttagagttcagagtaccaggatgtgagccagaaatcttgatactaccttgaggtctgaagggagactcatgactgtacaaagaagcctggcaggatatctggtacttcctgcagcccatctccctgccactcctctgatctccatgaaatcacacctccagatggacaggtaactgtgagactatgtggcctggaccactaggtcaacacactgctcctggttttcagctgacactccctttctttctccaatgaaccctctgatccagcacctcgcctccccttgggagccaagctcacgctcacctacatgcctttgcccttatgccctttcccagacccaccatcgccccaggcagcctccttcctctcctcctagcctaacccacacaactctcaagtacaagctcatttcccagcaccccagaaacccttctcaatgctgtctgtcacttccagcatcacctcccggcctagctctagaatcatgcaatccctccctttttgtttggttctgttccttaactattctggaaagatgacaaaagcaaattctgcttccctagggcaggaaccacagatatgggttcctgcatggccagggctgatagttcagcaaaggcgacttggagaggacactggccaatggaggggattaaggggacagctgtttccatgtggttaggtcagaccagcactgccaaatgcaaatgttctcttttaccaaaaaaaaaataaataaatttagaaattataatttttatgtgaaatcttctggggttggtgaaggaaataatgtatacagtgatctatttccaagccaaagtgccctaagtaggcttcggtcagcaaactacagaagtaacaggatatactaggcccctgcttccatagccaatgcctgattgtcagcctcccgcttcctcccaccttagttgccttcacctgagccaaaagtgcagtctaagatgaaagtttactagcttgcgaaatagctcattttgtctgttcttatcagcctgcccagctacttagatcataagtcaaatacttaaagagcccctaagctaactaggattgcaatgcattgtgggctgcgacaaaatggagcaagacaacccaaaaaaaaaaaaaacacctagagcctctacccaacaatcaataggcaacatccgggaagactgtgacagcatagtactcagcctatgaggagctgggggagggacctgtgccctaagagataaattgcttgttgaaactgtgctgggtgtgcctgtctatcaaaaacattcagtcttgcaagaccatcattaaaagtctcactttcgctgttctctgggtctctgagtccattctttgggcttggatgggtgagtttctcacattggcaacctatgctacagcagttttaagcatgagttagccaggcagagcctattggtggccatcccagtgcatgacctggaggctgcatgctccctcccaggtgatgggaagcggcttcccaggggcctttctttctccaataaactcgctgatccagcacctcacctcacccagggagccaagctcatgccctagtaggtttgagtaggtttctctggcctgttgcatcttcccacacccctgctgctaggtgcccacctctcctacagcctacctggctgcagcccaggtgtgggaagatagaagggaccagagaaaagctggggtatctcccacctcatgccccacaacaagacaaggcttcctccccgggttccctcctgcagtgggtggggccatcccagcttttcttacagcatcatatcattaaagcaaaaaaaaagaaaaaaaaaagaaaaaaccacaaccctaaagtgtttcatgtgactccgtgagggctgccagagagctaagagcttcttaagcagcttccttccaagccatttgggccccttctataaataaagctttagacaattttgcaaaaggatatttatttacctgatagatcataacagctcctgctcctgcggtgtctttagccctgttgggtgatctttgagcacttagctccctctcacctagttaggcctctttttggacagcaaaagaaaaaaataatatagagttgagctccttggaggagcaggcacctgacgtggggtggtcctcctcgccgtgggctcactctgatccaagccattaacacagaggcggcagcaaatgccaaggggaaattattaataagcaatgtctggaagactccaagccagcacgaacatttctaaagtggcaaagggaagaggcgggaatggggggaggagggaaccaccgttgcacatttctcagaagagcaggaccaagaggaaaacagaagagaacaacccgaggaagatgaatgattacaagggaagcagttctttccctctctgggtttcacctgcttcgattttgaggtatccctacatgcttttcttgcttcaaattgtgcagaggaagggcttagctcgggcattctcagcactggcactactgatattttgaggccagaccatccttgttggggacagacctgggtatcgtaggatgccttttggcatccctggcctctacctgtgtcatgccaggagcagccccctctcctagtgtgacaactgcagcatctccaggcattgacaagtggcttctggggagaagaatcacccatggttgagaactgctgaaattagacatagagataaaattgaggatcagtgcagaaaaaaatcagaaaggtcaggaaaagaccaagacagtggacctgagttccaatcccagctccgccgcttcccgggtgaccttgattgaatgacttcctatctgggtcttaattttttttttcacttataaaatgggattataattaaccatgccaaccacataagatattggtgagagttgaaacattattcgtgtcctgtcctcagcacaaagcttggggcagaatttaaaaatcaaaaatcacccattattattgtaacaatgtttatcagcgtatgcaaaatagtctctctcacaacctaccacacatgaagggttccaattcctctgaccagtgtgcttccattcatcccaagaagcctttgctgtgtggaggccgattagcaattacctcccaccccccttaaagttatattccaggaagacctgatgcagagactgaaactatttgcatcagtcatggttggttgtaagtgactggaacccacacttaaacagaagaggagtgccccagaatgctgaggatagctccagatcccagaatcaaaaaagaaggccgtggagcctggcttagcacagggcagaaccagagcaaatctgtgcccctgacagcagagaccaatccatgccactgttggagtatgatctctggaattagttagtgccagtcttttttttcttctttgttctcacatctctctgctcaagattcacagtcccaggaggcatctgggtgcggtggctcacacttttaatcccagcactttgggaacccaagatgggaggatcacttgaggccaggagttcaagaacagcctgggcaacagagcaagactctatctttacaaaagattaaaaaattagccaggcatggtggcatgtgatagctactcaggaagctaaggcaagagggttccttgagcccaggagtttgaggctacagtgagctgtcattgcactgttgcactccagcctgggtgacagagcaagagcctgcctcgaaaaaaaaaaaaaaaaaaatcccaggagagaatgtgattgactacctggagtctcatgctcaaccctgacctgggtgagtagcaggcactttgattgacaggtcttctaagccctacctcaggaggaagggggagggtcatttctaataggaaattggagtgctgttatcccaaaaaagaaacagaacatggagagctgataaaagcaacactcactcaccacacttctgtactttagaatgtacccatttgctctttgctggggcaatagctgtgtgtttctttagcacagagagcagaagcactccacctgttcagtattcactttacacttcatcacgagttcccaaataagacttccagcctttaggctagtctgacatcccaataaaaggagaaggccatagttagagaaaatgcatatgataaagctttcatttcccccggctgagaaggccagggcacactgcgctctccccagaaatgcgacccagcatcattccatcctccacgctcacagacctatgcccttgtgccctctcccgctcccattcctcacttcaccccagagggacacagcctggcttctccactcagccctctcccaaccctatgcatacttgattcacgactccaaatatgagtacgagcttgattacaccacacctggaaagaaggccctggaactaattaatctacagtttccttcacgacacaagcccaccgtggagaggaacaggagtgaacatggcctccaggaggctgcaactctacactaagccaggagacactgaggactgccagggtgggagctatcgatttgtcaatacgcaaaacacaaccggagagtcattttttctgctgaggttaccatttatcccggaagatgctcttggcattaaagcatggcatgaaagcttcccttagatggcaggataagggaaatgttagacacccagagagagtaacttggcacctgagatttattaatattttaaatgtggaaggcatacattccagggcttactcattgcttctggggaaggatccaggtaaacaaatccacaacatcgctagaaacaaaaactccacctttccatcctgttcctgcatgggaaaatgaggatgagctaattattcagatataagtagtatctttaggataaaaggatcgaaggccttcgctgttatatctggggtttctccatcataccatcctgggagaacaaattgaaattataattttattaatgacactcggaagagtggatcaatttttccatgaactcagaacttggcaatgaagagaccatactggatcatttgaggtcaggagttcgagacgagcctggccaacatgatgaaaccacgtccctactaaaaatacaaaaaattagctgggtatggtggcacccatctgcagtctcagctactcaggaggctggggcaggagaatcacttgaacccagaaggcagaggttgcagtgagccaagtcactgcactccagcctgggtgacagagggagaccccgtctcaaaaaaaaaaaaaaagtaaacttgggtcaatctgttccccacctagggccttttctacttggatgaatctgaaagaaaaataaaaatgaaaatcagaggtcattttatgggcagattccagcaccaggattccctgtgatttgttcaaagaaacctgctcctttccacgtgtcccttacaaaaagggctcttcctgcttggaccccctgcactagtcaatccaggtgacatgaacagaagtcatttaaggctgtggcttcagactccaccagtttctccagtctcctaatgagaactgaagagaagagtcatgagaactgaaagaagagagaaagaaaaatccatcaaaacttcatttagccaaaggagcaaaaactcaggcacaaaaccggtcagttaaataatcagtttgccttgcctttttgttgttgttgttagtttgtttttaactgattttttttaatctgcctttagcagaaccattagattctggccaggagtggtggcttacacctgtaatcctagcactttaggaggccaaggcagatggatcacttgagcctaggagttcgagaccagcctagacaaaatggtgaaacctcatctctgcaataaagaaacatgcacaagttatgttcattgcagcactatccacaatagcaaagatatggaatcaacccaaatgctcatcaacgatagactggataaagaaaatgtggtacatatacaccatggaatactatgcagccatacaaaggaatgagatcatgtcctttgcaaggacatgggtggagcaggaagccattatcctcagcaaactaacacagaaacagaaaaccaaacaccacacatttttacttatgagtgggagttgaacaatgagaacacatggacacagggaggggaacaacacacactggggcctgttgggggagctgggggagggagagcatcaggataaatagctaatgcatgctgggcttgatacctaggtgatgggttgataggtgcagcaaaccaccatggcacacgtttacctacgtaacaaacctgcatgacctgcacatgtaccctgtacttaaaattaaattaaattttaaaagaatacaaaaagtaactggacatggtggtatgcacctgcagtcccagctactcaggaggctgaggagggaggatcacctgggcctggggaggttaaaacttcaatgagtcctggtcatgccactgcactccagcctgggtgacagagcaagatcctattccttaaaaaaaagaatagaaaaagaaaaaaaattcttacaggcttccaaagaagatctgctgccagaccgtcagctaaaagcaggtgccttattaaggataataggctaaagagaacctctaacactgtatttcataattagactttgcattcttttcatattatagcacttcagtaaaggataagacctcaaaatagtatactttcattgttccccttttggactttatgctatgattgtcatacactttatttttacctagattataaatgctggagtctattaccacttttatttaaacagacaattatcttttagagagagttaactaacaagaaaaatattctctacatttccccttatagttacagtggagctcttcactttctgtctagatccatatatgatggaaatatggatcttgactttgcatttttgacatacttcccagacagactttataatttgacctagagattaggcctgggtcacagagccccccggctgtttctctgccctgcagctctctctgagggtgctcccgcctgccagaaagcccaggttggaaaggcgtcttctcagaagacttctccaatcctttctgcacccatgctccctctccaggcatggtgctccctcttggtatccgcccacactttggatgggcctctcattgctcttttcattgtcaatgccacgtagacacctgcttaccctactgggctgccagcttctgtgtgctggagctcatgaggtatccatctccaatacctggccccgaaggtgtttatgttttttgttgttatttatttatttatttttgagaggagtctcactctgtcacccaacctggagtgcaatgacgtgatctcagctcactgcaacctctgccttcctggttcaagcaattatcctgcctcagcctcccaagtagctggaactacaggcacccaccaccacacccaactaatttttgtatttttagtggagacggagttttcccatgtcagccagactggtctcgaactcctgacctcaggtaattcacctgcctaggccttcccaaggtgttgggattacaggcatgagccactgcgcctggccatgaagaaaggtattttcaggtttgctttctaaacagtctctagcaaatcactctccatggttactgtggcgcatatttgcctttcttcttgaaacatcctttccaagtttaaggcattcttctcaaagagatgccagcaactcactttaccaacataacttgcagctcgagtgtggacttgtgacctagatcctgtattcaggcaccataaaacttcactctaaggaggcaaagacacagccctgtacagagtctaatctggtgggctgactgcagatacttctcacttctagacacagtggtggcagtcatgccttattctggaaactgctgctgtaagacagggatatcttatcaacatgtcagtcgcaagaattgattgaacttgtcttttttaaaaaaaaattttatttccataagtttttgggggaacaggtggtatttggttacatgagtaagttctttagtggtgatttgtaagattttgctgcacccatcacccaagcagtgcacactgaacccaatttgtagtcttttatccctcaccccccgccacaccctttccctgagtccctaaagtccattgcatcgttcttatgcccttgcatcttcacaccttagctcccacttgtaagtgagagcatacgatttttggttttcctttcctgagttgcttcacttagaataatagtctccagttccagccaggttgttgtgaatgccattaattcattcctttttatggctgagtagtattccactatatatatatatatatatatatatatatatatatatatatatatatatatatatatatatatattctgacacttatcaggtgccctataaacatacaataggagtggcaaatagcagcttgaaaaccaaatctagcctgactgtgcactccctctggtgacccagtgcctttatctatctatctatctatctatctatctatctatctatatgtatatatatatgccacaatttctttatccactcattgatgtatgggcatttaggctggctccagatttttgcaattgtgaattgtgctgccataaatatgcgtgtgcaagtatctttttttaaatggacaaagaatcatttttgtttacataaaatattcaacataaaaattattttttatttatttaaattttttaaagatcaagaaaaataactaatgggtactaggctcagtacctggaggtgtttgttatcaagtaaatggattaagctgcttggtgtgaacacaagggaaaaagcccaggcctacaagagaaaaagcattaggggacctttccactgttatcacaggtgggcccggctgatggtgggaatgtgtgggaagccaggagactccagccagggcagctgggaggggcactgcactgtagacccaggaaattggagacaggtcttggttaatttagaaagtttattttgccgaggttgaggacgtgcgcccgtatattgatgttaatgctggagaggtagagtgaggcctgtccaatcccacttccctttatggcctgaaccagtctttcaggttaaattttaagagccctggctgaggaggaagtccatttagatggttgggggggccttagaattttatttttggtttacaccacagataggtctaggccatctcataggatcctgcagcaggttcaccttgggtctagaactgattcagacttttccaggagtctcctcactagctctgatgctaccacttcccagggccctcttcataaggacctgggtattcagagggagctataaatcagctccaagacagagaggaagaatgaatggcaatcaaggaaggcttccctgagtaggggcagagcttgtgggcaccatgttcccaaggcacacacctagaaagcgcacatacctctagagtgtgcacccacctctccagcgggccctctccagggcaaatgcacctcccttgtctcccatgtctgacacttaccaggtgccctataaacatacaatagcagtggcaaacagcagcttgaaagccaaatctagcctgactgtgcactccctctggtaacccagtgcctttatcaattacctttgactgcctcaagatcaggcagcccctctccagtcccccagagtccttgccactcccttgtcttgcttattttttcacattacatgaatagccctgctaggcatttagattcaccacctttggaataagctaaggaaagcaaaaatgggattctgataaaaagaaatgaatataggggccatgcagatggtaggaaagcaagagtaaaaggatggatataggggccctgcccagtgtgttagtgaatgatgagaagtcagccactgctgctatgcagaaagaaggtagtgaagcaggaggggagagcctgattataaacagaggcaggaagggagatgcactccgcagccagaaccctggaaatcggaccttgacccagtgttccccaaaaccatcattctcacttcgtcttggcaatttttgccatatctgcataccatctgttcaaaacttactttttaaaatgtttgcctaacttaaaaaaaattaaacctcatcctaaacaatgctcaacatcaaattcatgagttttatgtactagttttgtttcttctaatacacattaaaatacaaacattaccaagaaaagtctctgatattatttaaaattatttaaccactgtttcaggcccccaggttccacactgagaatcctttcttagtgtgtcttttgtctaaaagcaagattgagacaaaacctttcacttgaatgtagccactatttttttgttttttggcaaacaaataagcatcaacgaaacaggatgccttttcatagtttttcaggtttgggacttattagaataaggctaataaatctaatagaatcagtctattccattagaataatagggtcccctttgacatttcatctcaaaatcccaatgagtctccaattgtgttcgtctttctcaatctattccctcatctcccttcgtcttctaaccactctccactgacctggacaccacgagtggggtgggccagtgtcaccagagagtcaacctgtcaacaactgaacttgttatgagttgactctgggtccagactactgcattcaaaagccatttcacacctaacacctgtgtgttcacaagcacattgctgaccttctttgtgcctcagttttgttatctgtaaaatggggatgtaaacactacctatctgataaagtcattggtgaaattgacaagttagtgcatggaaacactttgctatgttgtaaatgtctcccaaagttcttgggttgggaactctatccccaaggcaacagtgttgagaggtagaacctttaagaagtaattaggtcacttcttaatggattaatggcctgactcatgggagtgggttattgaaagagagggtttctgataagaggatgagtatggtccccttcctctctctctctcaccctcccactttctgccatgggatgacacagcaagaaggctctcaaaagattccggtaccttgatattggacatcccagcctccagaaacatgagaaataaatgtctttcctttataaattatcgagactgtggtattcaattacggcaacacaaaataggctaaggtacacctagaacagtagctggcactcatgagccaccatgctggcctgtaccagcttttgacaaattgcatcttcctggacctccctcccatcaatccagcttgatctgctgtggaacatccaacatttctctgtatcctggcagctcaagaacagttttctcacaggcttccaagtcatgccatatttggcttcaagcaatcctgttggctggatcccccaatgtctccacacattgtccctgggtcatatcttcccaccctagctgggtgttccgagaccacctgggtgcattcccagagagagaccctccctgtcctattcacatttcacagctttaacccagttaaagccctgccttttcttgggggccttccctgatcacctctttcagagttatatggctgagtgccctgtttaagtcacagatgttctcatggctgtccatagggcccagggagttgtcgtgaaaataggactcacttataccgtatcccctgtggtctgaggggtgagcaaatgacccagctaaaccactcacagttagtcctttggaaggccatattgattggtccaagtaggtcagctgagccaatcaatcagagtccttctggagaccacagtgattggtccaaggaatcagctgagccagtcagagttattcctaaggaacttctgactggagttggtgggaaaagcttctttcctctggcaaggcaagctcagaagacctgggatgaggtgtcagccttgtagagaagcgaatgctgagggaagtgagtcagggaggtaaagacagaaagtcctgagagtattgagtctcagactccagattccctgccccgtctgtgatttaacatgaaaacaagcccagaatcctgacagtgaataaacaccctgcctttttgttaaagctatccagaattggtttatatttctggaaagtaaagaaactgtaataggctgtgcttcccaggctagcctttgttatgtgtgtatattttttaatttagttgttcacatgtttaagtcatccctgtctatatgagagagaggaacatatcccatgcttccttcatttctctccctacacttggcacaatcttgggcacaaaatagatgctcactaaatacgtaggcccacagaggatgctagaattggctggtaggcccagctgcaaacaggaaaattctggatcacctagagtcagcctacaagagtgcccatcacaaatgtgcaggaatcgagtcacagagaattatggttttctcagtaaaggttgcttaaaacaaaagcccattcatctgcctgcagaagacatttaatcaatttacatgagggatttcaaaattagtcagactgtaatgaactatgaaatactgattaatgcatttttgcaatgtttgattagaaacttaacatgtatgcgagcacatctttaccattacagcatttctatgttaatatttggttcttaaccatcggcagaatagatattctgaattacagaaccaaagtgtatttgtggtgaacaatatatgcacagttttcctgctggaaagtgcttcttgatgttcaggaggtgtctcacatttgagggggtgagtgggaggaagtagttcatgggatgcagtcattatgaagttgagtatgagctgctaaattatttgagagttctccagaaaccactagggtaaaagaggccagccatgtctcccaccccagccctccgctaacaacaaggcattctctgaaagaggaaacaatcccaattttactaaggcagaagaagccaaattcttttggccagaatttaaatataccacctcagtcaaaaatgtttgttaggttcctcctcaggacaagcaaattattaattgaaacgcttgaaaatcttcttgaacctatagaggccacagttttaacacagttttaacgttctttccttctttctctctttctttctttttctgtctttctttttttttttttttttttttttttttgagacggagtctcgctctgtcacccaggctggagtgcagtggcgcaatctcggctcactgccagctccgcctcccgggttcacgccattctcctgcctcagcctcccgagcagctgggactgcaggtgcccgccaccacgcctggttaattttttttgtacttttagtagagacggggtttcactgtgttagccaggatggtcttgatttcctgaccttgtgatccgcctgtctcggcctcccaaagtgctgggattataggcatgagccaccacgcccggccctttcttctttctttctttctttctttcttccttttctttccttcctttctttctttctttccttactttctttctttctttctttctctttcctttcttctttcttccatccctccctcccttcctccctccctctctcccttccttccttccttccttctttccttccttccttccttccttctttctttgagatggggtctcactgtcttgcccagtctggagtgcagcagcataatctcttggcttactgcaacttccacctccaagactcaagccattcttccacctcagcctcccaagtagctgggactacaggtgtgcaccgccaaacctggctaattttttctatttttggtagagacagggtttcaccatgttgcccaggctggtcttgaactcctgggctcaagtgatctgcctgccttgacctcccaaagtgctgggattacaggcatgagccaccgctcccagcccacacttttaaatttctgaggacacctccaaagatttttgtgtctgtgtatttcacagagaaggcaagttagtctctttcgtataactggaatgccctttctcctggcaagatcaacagaactccaaacatcaggtgatgctggaagtcataaaaagggaaacatgctgaattgcaaaaatccaatcaactagaagtatgatcttcttaaagttacttaaatcttatttgcacacatgcggaaaacatctaaagaggtggattgacatttttaaaaaagatgtgttaaaaattagctattaaagaatttgaagataaattcccacagtaggtttctaagagcactgatatgctgagcctggccccagccataagattatctgacaaagcccaggcatggtggctcacgcctgtaatcccagcactttggaaggccgaagcgggcggatcaaaaccagcatggccaacatggtgaaaccccatcttaactaaaatacaaaaattagccaggcgtggtggtgcacacctgtaatcccacctacttgggaggctgaggcaggagaatcacttgaacccgggaggtggaggttgcagtgagctgagatcgccccactgctctccagcctggttgacagaactggactctgtctcaaaagaaaaaagattacctgacaaacactggtttcaaaaggtgctcctgtggaaatccaatcaccatagagtgtgctaactccagaacagcaatatacaaatttgttcacatacagaagaagaggtcacatatgtgagtgcacgcgtgggtacacacagagaaacatacttcatgattcttacaagtgcaggcaattatctcacatttagattttaagcctcccttagaattttaaaaatcattattttgcaggatcgccattattctgattcattagcaaggcatacttatgagggtcttaaaataaccaggatgctggacatgtaaaaacatgcttcttgctgtcatgacaactaaataacaacaataatgctcacatccgaatgactacagggaacaaagttattgtgcctgaatatagataagttaattatggaatcatcaaaagaacagcagctctgtcaatgcaaagatgattccaaaataatcaataacaacaatcttgtttggtaattggctatttgtttccaatatgggctctacctttggtctgcgtggaaatgcagcaggctctttagccagcagaagagaaaaaaaaaaaaaaggaaaatctttcagtttagggttggtggttgtcagtagcaacaaataatggaaaattgccatctggcttctttgtttaaatgagatttgaataatcaatttaataatggatagagcacttgcttacagaagtaatccattgtcattgctcagaaaaaataaaaactttgtcaccagagacaaagctctgcggtgtgactataggtaaagcaaataaacgtctacgtacatgccacaatttttattttcactgctgactttacataaactagaggataactcttccttctctatgcttagcttttcacattctgtgtttaataatcaggacaaaatctacagagcagttggcttgctacaggcattcaactccactgatggttagtggagaaagagacacacaaatggtagatttttttagcacattttcccccatcatcatgtgacatattgtggaacaggcctgatttcagcagagcagaggaaataaaaatgcatctggctatggggtgtgtgtgagtgtgagaatgtgtgtgtgtttcctttacacagctgcacagctgcaagaggaaaaatgctattcagaaaggaagaacagggtgacaccagggatcacgatgactcattcatttacatgataaaaatgaagatagcaggaaaggtgttcctaacccgagcagaagcaggagtgatgacatccaaatatggggcttctgtcatgtcgttttgcgtgtgtgtttgtgtgtgtgtttaatgaaacatgcatgtgcagtatcccattggcctcaaaagacccttgaatctttgactaaaaaatttactggtcaggcacagtggctcatgcctgtaatcccagcactttgggaggccaaggtgggtggatcacctgaggtcaggagtttcagaccagcctggccaacatgatgaaacccccgtctctattaaaaacccaaaaattagccaggcgtggtggcaggcgcctgtaatctcagctactcaggaggctgaggcgggagaattgcttgaacctgggaggcagaggttgcattgtgctgagattgtaccagtgcactacagcctgggccacagagtgagacccattctcaaaaaaaaaaaaaaaaaaaattccatgtgatttgaaggagaaaaagggatgaaatccaggccctgtcgcattttggaaagtggcattcaggattcaaacagcaccatctgggctctacggacctacgggactggaaggcgggggcttctcctggcctccactgcttgaagactagagggtattaagggaggatcatcctggtgaatctggccttaggctcctgtttccccagaactcccgatccactcggggcacattccctttcacccggcactggttttctcctcggcctgtgtcactcggaaataccccctgtgaggtttcaggttgtttgcctcttctctgactgaagactcattactgttcacctctgcccctctcccaacccaatccacttcttatttactctcccaggacatccaatgaccaggtccctccccaggtcacagtttcattaacccccttccttcaacagggaagttagatctggttgactctcatcccagagactccctctgggacccaacttggccccagggttaccagcacttccttgacaccaaggcatcccaccatatcacctcatccagtcctgccttgggccacagagccttttataaagtcttagatagtttctcaagtcctctccacatctaggggacaactccattctggcccctcttccagctgggtcttgtgaattccctagacagagccccacagagactgagcacatttttccctgttcttcccaagacccccaccctaattcctggaaaaagcaaagccaggaggcttaacctctttcacttttccccaattatctgagccatcacctgtcacccatactctatataggggtatcttcttgccaggatttccactgcaacatggaaggaagacttgggaaaattgcagacacgtggttatgtgctcatcatcgccaacacattcagtccaaacagaatctcctgcgctaaaaaaaggaggtgttctccaccttgccagcctaatcctgtcctctctcatttctccagaactctaaaggtcccccttaccccagcagcttcaatctcctcctccctacttgttccttctcctgtatcctagtgtgcccagatcaccttgtcttgaaaagaaaaaaaaaaatccctggcctcagtatcctcggtgtcaagcagaccactgaatactcaggtcaggagtccaagaaagacatccgtggttcctatgccctccatggttcagcaaaggacataatttcattcttttttgtggctgcataatattccatagggtcacttccatttctattcttgtttcaaaatcctgaaagctcagaaggcaggttcatccatgtgctagggttgccacaacaaaataccacagatggaggcaggggcttacacagcagaaatttatttctcagagttctagaggctggaagtccaaggtgaatgtgtcagcaaatttggtttcttctgaggcctctctccatggcttgtggatggccgttttctcacggagtcctctgctctgtggctttccctcagtgcttgtgagtctttggtgtctctgtgtgtgaccagctttcctcttcttagaaggacaccagtcagatcggattagagccccactctaagggctttattttaatttactcaccttttaagaggccctatctccaaatacaactgcattctcaagtactgggggttagaggtgaatttgggatggagggtacagttcagcccagaacaccaggtgagaatgtccaagggtgtgcactaagagaggaatgcagagaagcaggtcacatccctggggggccggggttgtcagggtcaggaaagaaaaaggagagagtggatcctaaaggaaaagatcagggtttggagcaggagaggctgatccacagagacgaggactacaggatgggctgaggagtgacagcagagaagaaatcctgagatccagccatctcccctcccttgtacctctgtgaaagggagtggagcaatactggacacaggctggattcctgtggtctgagcagcaaacaggagagagaaaagcagaggccagatgcacatggaagggtgataagctgagtgaaagataagagaggccaggccagcacaatggttcatagctataatcccagcactttgaggaggctgagatgggaagatcctttgaagccagaagctcgagaccagcctgggcaacatggcaagacactgtctctatgaaaattttaaaatgtagccaggcatcgtgatttgtagtcctggctacccagaaggctgagacaggaggatcccgtgagcccaggagtttgaggctgcagtgagccatgattgtgccactgcactccagcctgggtgacagagcgagaccctgtctccagaaaaaataaataaatgaggctgggcgcagtggctcatgcctgtaatcccagaacattgggaggctgaggcagacacatcacttgaggacaggagttcaataccagcctggccaacatggtgaaaccctgtctccactaaaaatacaaaagttagccaagcatggtggtgcgttcctgtaatcccagctactcagatggctgaggtaggaggatcgcttgaacccagtaggtggaggttgcagtgagtagagattatgccactgcactccagcctggacgacagagcaagactctgtctcaaaaaaataagaaaaataaaaataaataaataaaactaagagaggccaatgcagagggtcaggttgaggatactgagagtgaaacagccaagggtaattgtagaagaaacaaaataaagagacaaaacctgtattatttactcaatgtgtacacactgtggctaagaatcaaaaccattagcatacaagaaagcatttagaaattcaaatcaatttatcatcactgtcactgtaatattgacaattattatttatttgttcaccagacatcctatgaacatgttacagttgtcgcttcatgaaaggaccagctctgcctggatttctgctgtgtaatggaagatggaaaaacttcaaacatatttttatgtcctcataatggatgcagttcaagccactgctcctacttagctaatgacttagcagggcaatggaaatacaagcaggtccctgcactttaagtgtggtcatggctcttctcaaattcaaactggcgtttctgtgcaactcttcctggcatatgagctcatggtgctgctggaacacattttcggtgggcacccagggaaccattaatcctagttgccacattcatgtgtatattcaggcttggagcatgtgaactggcttgcttggagtttgaaccaggacatcaattactaacatgtctgagaaattaatcttccgtcagaggataactcctacaggcaaaaacactttggctactgcatgtaaggacaatgttcgtgttctctgttcacatcagaaaagaaacccttattaaaggaggaggaggcctttgttaatggtgctgatactttgtagaccttaggaaaagggtcctctctgccccaagacctccagcttatagaagctgcttatgcaatggtagacccatccactctgcaataatgaacagacagataaagctttgctgggggtaagataactcagattttgctgttcacatgaagacactgtcaacttccaacccttggctccctgagcttcatttggaaatctcaaatcatcactttgtaaacaggaaagacattccctgagaatagggtggttaccagcacctctccccaaaaaaacaaaatgcagaattgtgtgggaaagaaaggcatagcatgctgccattctgcaaggagagggtgattgactcaagatagggtgataaagatcaattgccttggcttggagttatgacaccaacaaagttacaatgacattagcacaaagagagagacacaaatccattacaaagatacaatcaaatattcaaaaaagcctggcatgctccttacttattcatgctaatacaagtatattaagaaatctaaacagtgttagcgctcaatcactcacaaaccaaatgaggttttgcatttatcagactccagtcatcagggcctgtacaaaggtggtaatgtgaaataactggagatatttatatcagcctacatggacggagagatacaccaggatttattaaaatgaggaatgccatcacatttacacagcaataaaagaaataactgtgcagaagtcatttccccagacaataagatttacctttgcaatctcttaaagattttgtatgttttcaaagggtcgctggcagcatttccgaccttaataaactatttacggattaatttcttccacaaaggactggatgcccaaaagtaggttccctcctcgagagccagcaatagactctaaacctttctgtttctgaggatgctgcacacagacacgtgtattccatcttctcagggactgctctttgattaagtgacatgtcctcaattttcaataaagagaagtctattcaggatactgggatgggggtgggtggtgatgtcagtaatgatgtcctagttcaattatccagtgcttgggttttggggaacctgagaggatatttaagaagatccacaagttttacagtgaggagtgcaatgggaagccacagaagatccttgaaaagggattatgctccagcatgagagttgcctcaccagctttgctcttctctacctcccaggagttttctgctcccctggtttctgagaaaatcctcctccccatcttttcttcctccattggtgtctcttcctccctaggttcctaatgttgctgtcaactccatttctttcttttttttttttttccttcgctctgtcactcagggtgaagtgcagtggcacaatcttggctcaatgcaaacctccacctccagggttcaagcgattctcctaccacagcctccggagtagctgggattacaggcacccgccaccatacctggctaattttttgtatttttaatagagatgaggatttcatcatgttggccaggttggtctcgaactcctgaccacaggtgatccacctgttttggcctccaaaagtgctgagattatacgcttgagccaccacaccaggcttttttttttttttgaacaaagatatcttcatctttaataggggtattgctagccagtatgtgcgtgtctgtaatcccagctactccagaggctgagacaggagaatctctcaaatccgccaggcgaaggttgcagtgagccaagatcacgccactgtaatcccacctgggtgacagagtgagactctgtctcaaaaacagaaaacaaagaaacacaaaacaaaaaaccagaacttaaatagggatattgcttttcttgttaaagaacatttactgttacacattttatttcatttgttaataattttttttacatttcattttctattcagaggctacacatgcaggtttgttacaagggtgtattgtgtgatgctgaggtttgaggtccaattgaacttatcacccagatagtgaacgtaagtacccaataggtagttgttcagcccttactctcctttcttcctctccctttggaatctcaggcgtctatttttcccatccttgtgtccatgcacaccctgtgtttaggtctcacttacaagtgaggacatgtgttgttaaattttctgtttctgcattcgtttacttggatatgcaaattgcatccatgctggatttgtatccctgtttctgtaaaggacatgatttcattcttttttgtggctgtgtagtattcattcttttttgtggctgggtagtattccatgggatcactttcatttctattcttgtttcagtctcttctccccatggctggtctcatccatgcccatggcctctagagcacatggcctctggcaccccagtgattctccaaattacaatgtcccagacctctcgctggaatctcagagcttcatatccaattgctcaccacaacaccacccagaagccagacactcagagagcctgagtctgtcttgattcttcttcacctagaacagacagtgagtcacctgcaaggtatcttcatcccctccattccaacctcactggaaatgccctggtacgggccctacacctccttctcattcatgggtgcaatcccagcccatctctccttcccccagagtaatcttgctgaaacatgccttgtacttcattgctgtccctcttaaacggggccatgaatggcctagagagtgaggtccaaacattttcccagtgccacggggcccttcctgctgtcagcaagaatgtgtccttgctgatgttaggcatttgcatgaagcctaagttataaccacactgtaagcacaccctcccaccaagtggcccgtgcactctctttctgtttgcttgcttgcatatctgatgcctgggcagccttcttttgccctctttcagggtcttcctcaaaagcatctcttggggaaacagccagaatcaggcacccctccacctgtgctcctctggccctctgtgtcctccttccaattacttccagggagacagtgggctgctaaccatctggcactcagcctccttcctgcagttcaggcctggaaggattcatgatccacagcagaagctgccctacttgctaggatgtctcttttccctctgtttccctttagtgtgcaatggccaggattgggatcaaagtctaacaaggtcttgctgggcaccaggcagaaggataattctctcccagtaatccatatcataatcagttcaggtcatctcaaggaactacatagaactgtgcttatcactgcaagagacacaggaaaaggagagccagccgctgcctctcagaatctaataggaccatcctaagaagcaatttcaaaggacgtaaaagctggcttgtgccagatgcagtcaaatgccacctgctgaagggtgaagggttgagggcttgggtttcaaattctggtttctttgtgctgatggtgtgtccccacttccggccttagcatcctcacctgaacatgtcctccaggggaagacactagcctgacatcttaagtgttgttagaaggtaaatgccatgtcggctgagacactgtctgtcccattcactggcatatccccaatgtctggcacttagtgggcactcagcaagtatttacaaaggaagaaaagaaggatgaaaggagtaaggaaagaagacagggaagacgaggtggctgtctgccctttcttggttgactccctcatttgtttttcagttttagagacaaggtctctcccactatgttgctcaggctggagtgcagtggtgcaatggtgcaatcactgctcactgcagcctcaacctcccaagctcagaggatccttctgcctcagtctccagagtagctgggactatgggcgtgcaccaccatgcctggctaattttttaatttaatttaatttaatttatgtatttatttatattttgtagaaattaggttttgctttcttgtccagacttgtctctaactcccggccgcaagcagcccttccaccttggcctcccaaatcactgggattacagacatgagccactgcacctggccgactccctcattttgatggagcaagtcttccttagcttctgatacatagaaagtaaattggttaagagcttctatgactgaaaatgtcattattctagcctcatacttgattgatagtttggctaagtagagaattccaagatgaacaatttggaagatgccttctagtttccagtgtttgtgaaaaaatagaactcccccgtctctctctctctctgtctgtctccctctcatttctctttctctcctatgcatgcacacatggaggtacacatcttatagattgtctttctgtttccattattcataaatttctcagtgctgggctttagatgtggacatgtgcctatccattggcctgggcactgaagtcaaaggaagtttcaagggaatcattttctccatgacctcctcccctccggtttctctattctcttcttctggaactcagatctttactcagatctttggtttcctagagcagtcctttaatatttgttattatttatctcctattttacatctttttgtcctttcccccatctttctgagtgatttcctcaagtataacttcgctgcatggggtggggagaaattgggagatctaacagcttcttcaacagactggctaatccctgagccagtggggtattccatggtgtacatttgtggactctcagctttccccactggcttgggagttagtactcttgactaaggtacccaagtcccttactactcacacatttatttcctaccttccaaaattcttctgctgcaatttcatctgctgtttctcctgttcatgtgcctttcagaataggcagtgtctttccagtggggttggagagaagagataaaaacctcactttgttgtctatatatttatttcaattttttttgtttttttgagaaaggtctcactctgtcacccaggctggagtgcagcagtgcaaacatagctcactgcagccttgacctcctgggctccagcaatcctccttccttagcctcttaagtaactgggactacaggtgcttgccaccattcctggataatttattaatgttttgtagagcctgggtttcactatgttgcccaggcttgtctcgaatacttgacctcaagcgatcctcccaccttgacctcccaaatcactgggattacaagtgtgagccatagttcccagctacaaagattgtctataatatatatgctgcaaatattttcttccagtctaaaagttgccttttgcctgtgtttatcatgtcccctctaaatggagctgcttttgatttttatgtagagaaatctgttgctctgtctcttgagtctgaaatcttgcagaagaatttaatcagcagtactttccagtttttgttcttttaggggttcaaggcatcctctggccattagtcattcttaatgaagaaagccagaactctgaaaatgcaccattccctgccctgagtagcttcattccactgggtagtgatcagcccctagtaattcttgggacttccagtggacctgtgtgcttccagctccccagtcagacatgcaagactccattctctaggcagggtgcctgtcaagtcctcaccatgagggcacccatcctcaattcactgcatggacttgcttcttggacactatcctcggcatctccctcccccaagactgcctcattagccgggttattcaaggccgtgttcccacagggcacagctctgcgcaggagcaatgcagaccccaggtgcatacagacacagctctggcttgatgccatttataagcagtgactgataaatccagagctttggatcagataaaacttcgataaatggcctcttcacgtgctggtagcaatacctactcctgtccattctgagtcacctgctgcaattggcttcgttttgtttaatcaacagcacaggcaacaatgcttgaaagtgatcgcactggtgagaaacggtggagatagtcccctaccaaaggggacctgagacagaaaagtacaaaaactcacagccctgttcagaagcccccatgcctgggataatgcagcccatcttcctctatcttggctgtttgaagaggaacaaaggtggcatcctacagtagaccacagaggtcactgggcctgtgcacaaatgcaaggcatcaccccaagcatcccctttgctgggcacgcctcacctgcccttagtccacctgcatctggagcaagtggctcaccagccctggctacttctcagaaggaagtaagccgcctctctccctctcatgtttgtaaaaacacaactctgtcttcaccttgcctacagcatcaggtccacaaagccaccccttcccccaccatgaatcagaatcgcccagataaaggagttgtgttggcctagcagataggcaagcaaattgggcctgtttgcaagggatagagcatttggagagctgaaaacttctctaaagctgtaagaacaccattcagtcctgttcaggccactcagccacacgggacagttccatgcatgtagccccccgctaataaccattccccaccccccacccacccacacctctgcagatcaggactctcaacttggcagcccttgttgctgtccacaagaatgaaaacaaaacaaaaaaacagttttcccaggagggaagctgggtgaagaagacatgaaatgcatagagccttctccttctggcccatgacagacatgaaaacacagatgcaacacaactctggtccaaacatccctgagcctgcacattctatgaatctgtcgcttcctttgtaaaatgaggagaaagtgactcaggcttgagagacagacagtgaaaccagatttcaaagcccagttctgccactgacctgctgtgcaactcagggcaattatttaatataatctacttctctgagcttggttccttatttgtaaaatagagatttacatctcaaggtgtattcatttactcagtcattcagcaaatatttatttgacttgtactgagctccaggcagtgttctaggtgttagcgatggtcgtgaacaaatgaactctgtagggtatggcacagcacacaggtgctaagtaaataatgactgttattactctcactattgctaatgagttttgtcatgagaagcaactggaattaaagtatgttagtgtattttataagtgtaaagctctctgcagacattagctgatattatttcttccatggctcatgctctaagagaaggccaatgggttgctctcggcccctttcagaattgcaagagagctgccaccagttcttgccacatctcctgtctcatgtacacagctatcttagaattcatgctctgaacaggcagcaagagagatcaaactttttctttctccaagtctcaaggtgcctcttttgtcttgcatttctctgatcattggagctttaagcataactaccaggttttcaaattagtcatatttgtctgtgtgcatttgtacacatactaatcagcatcaaacacatctcggtggatagagatagatagatacatagatagatacatagatagacaaatgataggtagataatagacagatgatagatagatagaggttagatagatacatagactgataataaatagatgataggtagatagatgattgatagatagatagatagatagatagatagatagatagatagacagatagatctgtgattgcttacctacaataaaacctctttaaggaaggtccccaggggttgggtgttctacgaaactaagctcaaccatttctgcccccaaatgaggccatgaagagtaggaaaacaaaaggaggggagggccagctggtgctactgattttaacccagcaggctatcaggttgcactagccaaaccctgggttggataagccatggcaagatcaaggttgggctaggataactgtgaatggctcagcagtccctctccataagtagttatttctctctttggagagaagagctttgcttcaggacctctgtccatgtgtgatgaatggttgggaccagaaagacatgcatgtgacaaaaatagagtcagcttgtattcctgcagaaggtcaagtcaagtatatgcctggccctgggcaacaccaaactcaccactgctgattcctacagagtgttctcctgtcctgacatcatggctctcagggccctcccgtgcccagaaactaatcagtatcagacacatctaggagaaattcagggactgcagcctcccttgaaggtggcagagagaaccaaaccctcaacccacccccagtcacaaaggtaaaatcaggatggaaaccaaaagactcatttttgtacttaatttccattgattaaaaaaatatgtaaatgcaaagatgttgacacgattaagccattatgggcttattgcgcaattatttctttgatagttcatgacggctcaattggaggcataatggactattatgcaatgacatctttgctgagttttttgcttgttttcctcttttccttaattttctttctttcatctttcctcctttaaaaaaagagagagagaatttttcatttgcagatcattgactttttaatgtcagattatttactcaatagtcaataacgatgcctttggattcattatgggctatcgtgtaaatagctaattgcattaataacagcctttttacaaatgtttagtttgcagctcatcacacccacggactgtgtaattgctgctatcggggctgatgggcaggcacagccctgggtgcctgcatggtgacagggggacgtctgttgcctttgttctaacctgaccaagttagaaccactaaccacatctgtgcatgcatgtgtgcctgtgtgtgtttatgtagaggggagctatggcatgaacatttgtcagttatttcactttatgtttataaagatgaggagggattcttaggtggctgaaaattttgctttgaaaaccgtcgtgctaatttaaaggaggaaaagtctatgagttggaaagactaacttattaagaggcagtgtgttctgtggggcatttttctttcatagattggagctagtgattttgagagcagattcagatcctggagtgcatacagaacaaatctcccaggatctggccgatgtactcacgaggctcattgtcttcttgtcaacagggctttgtgtttgtgaacagggattctcatatgcatagagcctttgtggaagccatctaatatcttttgcatgtacatttgaggaaaactgaggcagaagataaacacggtcagcactgggtcagctggtgttcacttgtagtggggcaggtggttccttggatcaaagtgatcattttccactccttcacctgcctgttttctgagccccggggccaaccacagcatcttccttcattgtcccagggggctcctttccttccttcttgtacccttcccaagcatctcttcacagccttcactgcttggcatagaccatccctggccaagttttcagtccagatagattgctctgcatgtcaggggttcagcagtatattcaaaattgaaaatataatctcgatcactttttaaagacaattcaggacacctaccagagatcagactgagttagcattttgagtaaagggacacaaaaattgtgctctgcccccaaactgaaaggtcttcctccacaactacagtgaaccccacagtatactgggcaaggggtcttatctgcaagatgtccatccactcatcatccctccccaatacagaacgtacagaagaaccaagaccaatctgcataaaccatttaatccaaagacagcatgcacttggattgcgaacttggattgtgaacagcaccctgttcgcttggtcagtgttgacaaaatgctgaaagtcctcaggcctttgccatttcaactcctagaacttgaacttgtgggctggtgaaataacgcataaatgtctcctgttagctgcacatctctttctccacctttagaatgctttcctctatttgatcacttttcaagtattaatggtaagtcataattccaaaataattttgagagcaaaagaaaataaatacacccagcctaggagataaaaaagagttatgggactagtttagacaagattatgacacttatcattcaactaaaaccataacataataaagaattttacgcattacatggtcctcttttcttaacataaagggataaatggcacacttctcatatctagcaacataaggtactcaaatctattcagatggttctactaaaattgggagaattaggaaaaagaaaagatgcttactaactggaaaagttcatgcatttttaaagttttattttacatatgcaggtttgttacatgggtatattgcccccaggtagtgagcatagtacccagtgggtagttttttaacccacaccccctcctccctctcccctctagtagtccccagcatctattgtccctatgtttatgtccatgtatgctcaatccttagctcccacttgtaagtgagaacacatggtattttttctgttcctgcattaattagcgtaggattctggcctccagctccatccaagttgctgtaaaggacatgattttgctttttaatggctgcatagtattccattgtgtacatgtaccacattttcttaatcgagtccaccattgatggccacctaggtggatttcatgtctttgctgttgtgaataatgtggggatgaacatacatgtgcatgtgtctttttggtacaatgatttgttttcttttggatatatacccagcattgagattcctgggttgaatggtagttctgttctaagttcttgagaaatcacaaaactgctttccacagtggttgaactaatctacattcccaccaaaaatgtataagcattctctgcaacctcaccaacatctgatgttttttgactttttgataatagccattctgactggtgtgagatggcatctcactatggttttgatttgcatttctctgatgattagtgatgcattatatcatatgcttgttggctgcttatatgtcttcttttggaacatgtctgtttatgtctttcattcattttttaaggggcttatttgttttttagtccagaaatttctgagtcttggttgcaaatgtcagaaaccaatttcaaggtggtttagggtaagtggatttatcaagaacatcctccaggtgccccatagagccaaacagagcagtgggctggatcacaggagccctaggaggcaaagcattcagggctctcacactctcttaccacttcttccccctccctctctctgccaaggtgagagcaccatggtgagggcaccaaggtgagggcaccatggcagccaaacactcccaagattctactgctgaaaagaaagtctctctggatcccaaatccaaaaaattataattgttgagtatccaccactgaacttaacaatggtgccaggagatcattggaatcatagctaatcacccaagaccatttgaatgcagcagagagagtgggggaatgatggaacagattatatgagaaaagggagaaaaattgggataagcagtgaaaacaaaatgtattctctacgtacaggcaggatttcccatggtagtaattatgaccctctttcagttatccatgccttgggcatagctaatgagcagcagctggggtaagcggaagcagagttacagacaatcagcaagcatttgccaaacccttgcaacatggactgtgatatagtttggatgttttgtccccttcaaatctcatgctgaaatgtgacccccacctgatttcaaattatactacagagttatagtaaccaaaacagcatggtactgacataaaaacagacacatagactaatagaacagaacaaagaaccaagaaacaaacaaatccacatgcctagagttaacttattctccacaagatgtcaaaaacatacactggggagactcagtctcttcaataaatagtgcagggaaaactggggatctgtatgcagaagaatgaaactagacccctatctcctgccacataaaaaaatcaactcaaaattggttaaacacttaaattaaacattggagacactcttcaggacattggtctgggcaaaaatttcttgagagtacttgagagtactaataagccacaaacacaggcaaccaaagcaaaaatggacaaatgggatcacatcaagttaaaaagcttccgcacagcaaaggtaacaatcaacaaagtgaagagacaactcacggaatggaagaaagtatttgcaaactacctatctaatgagggattaataaccagaacatacaaggaactcaaacaactctacgagagaaaaatctaataatctgatcaaaaatgggcaaaagtacatacaaatggcaaactggtatgtgaaaaagtgctcaacctcattcattatcagagaaatgcaaatcaaaactacaatgagatatcatctcacccccgttaaaatggctttcatccaaatgacaggcaataacaaatgcttgtgaagatgtggagaaagggggaacccttatacactctaatgcaaattagtacaaatactatggagaagagtttggaggttcctcaaaaatctaaaaatagagctatcatatgatccagcaaccccactgctatgtatccaaaagaaaggaaatcagtatatcaaagagatgtctgccatctctgttgcagcagcatttacaatagccaagatttggaaataacttaaatgtctatcaatagatgaatggataaagaaaatgtggtacatatacactatagagtactattcagccattaaaaaaaaagaaaatgagatcctgtcatttgcaacaacatggatagaactggagatcactatgttaagtgaaacaagccagacacagaaagataaacattgcatcttatcacttacttgtgggatctaaaagtcaaaacaattgaactaatggaaatagagagtagaagaattgttaccagaggctgggaaagagagtgagggttgttgggggaggtggggatggttaatacatacaaaaaaaatagaaagaatgaataagacctactatttcatagcacaacagggagactatagtcaaaaataatttaattgtacattttaaaataactaaaagagtataattggattgtttacaacaaaaaggataaatagttgaggtgatggataccccatttaccctgatgtggttattaacacattgcatgcctgtatcaaaatatctcaagtaacccattaatatatatacctactatgccatcacaaaaattacacaggaagcggcaaacacttcctgcatgcagaccacctggggtttatggtacagaaagtggatccacctcccaagggtaatgccacatgtcccgtaacatctctgatgaaaaggtaccatctttatatgaatattccagcaagtgctaataatgctattgttcctgtcacttatgacaattccttatataacttcccagaaagatggtctgacctggacctggaattctgggaggttcagagaagcaaatatccttatccaagggatagcacggggaccccaggactctgccttaagacatcagaccatcatctctgccatccataggtctgcgctgggtgcaagtcaccagatccgttatcgggaaaccaaaacggccactttgtgagaatcacccttctccttgagcacccctgccaggtgtgctgggagattcacatggacctcactggaggaaaatccagtactagtcgatcagtggcaagtggacaaggcactcatattacaaaggattcacaccatgaataatttatttcggacttctcttcaataacaagatcccatacatattcttttcttctttgagagagagttccgcttttgctgcccaggctggagtgcagtgctcactgcaacctccgcttcctggtctcaagcaattctcctgcctcagcctctggagtagctgggattacaggtgtgcgccaccatgcccggctattttttgtatttttagcggagacagggtttcaccatgttggtcaggctggtcttgaactcctgacctcaggcaatgcacccgcctcagcctcccaaagtgctgggattacagtcgtgagccaccacgcctggccacagattcttaaatgaatcaatttccaaaagtttgtttcccatatgaagtttcagaaatatgcaaaacatgccatataattagagtccgtagaactctaggaagactggagctggaagtggctgcaggcatatgtaagcccaatgacttttctaactgaagtgtgtagaagtatcacctatgacacctgtcaaaaagacctccatgtgccttccccaggcagtctgattctgaagacctggggcagacccagcaagcctgatcctggacatccatgaatcccactgctggggaaacagaagcaggatagcttcagtgactcctggaatcacacaaagcctggacagacctgggactagaacccagagctctgatgctcaaaatgctgcctctagttcagtaactgcttttctagaatgcctagatgatgaatggcttcaacaactggaatattttatctctaattctgataagcaacaattatttcccagagggtggggcaaatagaatataaggcagaagataaggatgttttataaattggaagagaagcctccagcccctcattaatccactctgctttgctctaaactaaagaggattgcatttccttttttttttactttgaaataatagactgaaagaaaaggttccagaagaaaatccaaatgaacgcccaagccatgttctctcacaaaagaatactgagcaaacttttaatgcagatgatcctggaacaatttaatagctaagtgatccatgatttttcttaacatctatcctcattaaaagagagagagagagagaaagagagggagagaaaaaagaagctgagaaatatctttcaaacccgatgaattcaatgccacttctttttcttttacttaattttccaggtatctcagcatgatctgaataaattatgctgacaataacataatataaatgataaatcatcaacacaattttagtgatatattgcgggaaatgtaaataataaccagggctgctaattggcttgcttcttgggaacaaagctgtgaccgcgtggctgtgccagtcttggctccgtcattaagtatttctgctggtaagttgtttctgctgatctggagaggaaagcgcagcctcgcaggcaaacctttgtgtgaaacttcttctggcaagagcaagggcttaagagagagagaccgtggtgagttgcaggcgatactttctttgttcctccagagtgcctgtgggttgcaagttggcctcgattcccgtgcaaaactgtgttcccctagaagcagcagtaagactgagacaagggaaatctcttcaagtcagttaagttgctgaatctttccaaaaactcttctgactcattttgatttcttcctctctttttttttgctttgataacgatttgattacaacttcatttgaccagaaacataagctgtttctatgtgcttcttattttgaaaataccttgttagcattcatcatatgtttatggagcttaaaaatatattttgtttccttttcccaaacaaacccttctgctttctaacagggttgggcttcttatctacagtgttccctctgtgtcaaacgatgtcttcagaaaaaaaataacctggggtgtagtgggtatattcattcatttactgagcataccagaccagggtttgagtcctgaggggacaccatatgaatcccaggggcaggtttccactcttaggttcttacatcctagtgggagggccaggcagagaaagaagaaacataatacatttaaaaaattgatttgagatcatgttgtttaaaacaatatagagccataagacagagaggagcaggtgtgatagatggttccaggtggcctccacaaggaagtgacattggagttggggcttgggggaccagaaggagctggccatgcaaaggtctagggaaactgtgttccggacagaggggcagcatgtgcaaaggccctgaggctggaacagtctattaagtgtgagggagggaaaaaaaaggcagcaactggggaactggtttctcactgcagcatgatggtaccccaggggaccatttgaaaaaagaggagtttctttctgccacaccaggggtcgctgcacaagacttcacccccatagctcccacttcacatcatacctttcatcagtggggctgtgacttcagagcttccaggaatgccgctcccataaccggtcttctcccagctccttgtgctcgggatttgaatgtgtttcctcctccaacctgctggcttcctaagagtagagtcattctccttaaagattggccagcccatcactgatgtgatctagctcagagtgggtcctggaggccactgccggggactgggcctggagtgtggtttctgtgttcgtagccactgtactattccattcttgtgctgctaataaagacatacgcaagtctgggtaatttctgaagaaaaagaggtttaatggactcacagttccatggggctggggaggcctcacaatcatggtgtaaggtgaaaggcacgtcttacatggtggcaggcaagagacagtgtgtgcaagggaactctcctttattaaaccatcaaatctcgtgagacttattcactatcacaagaacagcacgggaaagacctgcccccatgattcaattacctcccaccgggtccctcccatgacatgtgggaactgtggaagctacaattcagaacgagatttaggtggggactcagccaaactatatcagccactttgggttccagacacaaaagcgcccagccaggagcctctgatgggatgcttcttgctacacccgggccctggcctgctgccccttgtttatcggccagcaaatctggcaactcaccaccctaggagtatgagagcacaatatgtgaggtccctgacccctgaaagtgaagccaccaatgcattccctggagagatcccttaagtggctcacagcagagagcaactgctttgatgaaaagttctgaagactaaagaactgcccctaaatattcctgtctcaaatgagctggcagctctacttccttctaagagttaacttggacactggcctgcaccttagagaaggtcccatgaagtcaaccagcagctgaataagggcagcttttactgtcaaaaattatcaagacagggactgtggccaaacagaagagctgcgggtttagcaactctcttcttgcagccgtcatttctaggcctccatcccaccatcatcaaaaccatttattaagcactccatctgcatagagctcccatttaggcctgggacagagtgagtctgttagacaaaaggtccccatcacagagttatgggcccatcacagacagacagtgatgaggcagactagctaattaaggcaggcattaagccaagaggcagagttacaaagcatttgcactggacacaggcagaagagtccaaaggtcctagtggggaggagaggtggggaaggagggcctcatgcaactctgccatttggatttcaaaggcttccttatccaatgaagagccatgtccattggattcaaagtcaaaggatgatcattattgttttttcatttcagtagcttttggggttcaataggtttttggttacatgaatgaattctatagtactgaattctaagattttagtgcacccacctgtcacccgagtagtgtacattgtacccaatatgtaggtttttaaatccccccacttcccaccctccccctaatctccaaagtccatcatatcactcagtctttgtgttctcatagcttagctcctacttgtaagtgagaacacgcagtgtttggttttccattcctgaattacttcacttagaataatggcctccagctcaatctaagttgctataaaatacattatttagttcctctttatggctgagtaatattccatggtgtatatgtaccacattttctttatctactcattggtcaatgggcacttagactggttccatatctttgcaactgtgagttgtgctgctataaacatgcacgtacaagtgtctttttcatataataacttctattcttttagttacatacccagcagtgggattgctacatcgaatagtagatctacgttttgttctttaaggaatctccatatcgctttccatacaagttgtactaattcacattcccaccagcagtgtaaaagtgttccctttcaccacatccacaccaacgtctattgttttttgactttttagttatgtccattcttataggaaggaggtgatagctcattgtagctgtaattcgcatttccctgataattagtgatgttgaacattttttttcatatgtttaagaaatggctttcctgtccattgcctttgtttgagttccttatagattctagacactagtcttttctcacctgcacagtttgcaaatattttctccccttctgtgggttgtctgtttactctgctgatgatgatgatgatgattattattattattattattattattattattattgtgcagaagcattttaatttaattatgtcccatttatttattttgatttttgttacatttgcttttggggtcatggtcatgaatcctttgcctaggccaatgttcagagagtttttccaatgtcatctttctgaatttttgcggtttcaggtcttagatttaagtctttgatctgttttgagttgatttttgtatgaggtaagatatggggatctagttttattcttctacatgtggcctgtccatttccccagcaccatttattaaataggttgtcttttcctcaatttatggttttgtatgctttgttgaagattagtaaaaaaaaaaaaaaaaaaaaaaattgtgtaccagacttccacttcaggagcaacatggcatagcctcaccctccccttccaatgacctctaaatataactaaatactgtggaatttattcaatagacaatgttagaaggactctaaagactggaaagaagaggatggactacctaggagacttggagcttgaatgccaatgtggtgagttcctcagattttctttgcatcttccatatactactacactaggcttcagaggagcttgcaacccagaactgccaacaagtacacacacacaaacctgcacgcacaaaagggaagccaaggcactgggcatgaggaaagccaacaaagaccatgtgggaaattccaaccctgctgcacaacccaggcccagaacagtggtctgtttgttaagcacagtggcagcaaagcccagtcatgccaacccttgtcttacaaccagggtcctgaagggtagtctgatctgtcctcagtggcaacagcaaagctccaggatagcctagactctactccataaccagacttcagtggacaggccaatctgcaatcagcagccaacagcagcagcagtgaagccccatgtctccctggtctccaaccaggagcatgaggagactcaggcccagcatctcctgcctttcctccccagaaggtcacccagtaacagcagccatcccagagaagcaagcatcttattttttctacatttgacaccatcagaaattgctcaggagccccagcagcacctgaagcatgaaacagactagaacagcatcacagggctcaaaaatctaaactgtcactggaactaaagttcacaaaagtgtgccagaaagtgcacactaaacccaaacagagtgactgcccactgaaatagaagattgaaatatgattattagtgctctgccataataatcaaaatatacaagatacaatctaattcactcctcataccaagaaccagaaaaatcataattagaaagaaacaaggcaatcaactaacacccataccaagttgcatctgatgctgaatttatctgacaaagagtttagaacaaccatggtaaaaatgcttcaacaagcaattacaaattcatatgaaacaaatgaaaaagtggaaaaaaatacaagttgtaaaagccaccaaattgaaattatataactgagaaaaaaatcccaaataaaaaatccattggtaagttcagtagtaaactggagatgacagaggacagaagcaatgaacataaagacagatcaatagaagttactcattcggaacaacagagggacaaatttaacagagcctcagggatctgtgggaaaataaccaaaggtctaatctttatattatcagaatcccagaaggaaaagagacagtgggactgaaaaagtatttgaaagaaataatagttaaaaacttccaaaatttggtaaaaataaataaataaataaataaacctgcagatttttgaagctgggtaagttccagatataaacctgaagaaatccactccaagacacatcacaatactgaaaactaaacacaacaaaaataacattaaagagagaaataatgtattaccaaaggaaaaaaacaccaatttaaatgacaatggatttttttttttatctgaagctatggaggccagaagaaagtagcacaatatttttcaagttttgggaaaaaaaaaaaaaagaagaaaagaactgtcaaccttaaatcctatatccagcaaaagtgccctttaggaataacgaaaaaataatgattttttcagacaaataaaaactaagataatttggagcacacctactgtttgagaaggggtaaggaaagctgtccaaacaaaaagaaaagaacaacagaaaaagaatataatatttgaagaagaaacaatggaatgggcaaaaacagaagtcaacataataagaccatccttcaactcatgagtttctttgtggttaaagcaacagctacaacaccatctaaggtggtgattaaggtatataaaagaaatactttaaaacaattatattttaaaagtggagaggataagggtgcctaaatagaagtaaggtctatatacacttcactttaggtgctaaaacctaaatatcttaccattatgtctatggtaagatttacagtaaccactaagaaaactgtacaaggtgacatattcaaaaatattagaaataaatcaaaatggaactgtgaaaattttgaattaatccacagaaaaggaagaaaaataaaaacagaacaaaaaaataccacaggaacaaatagaaaacaactaataaaaaagcaaacctaaatcttaacatgtcaataattactttatgtgtacatggtccaaacacagctaaaagatagtgatttagcagagtaaacaaaaaatatgacccaatacatgctatctacaagaaactcactttaaatgtgacaactaggtagattgagtgtaaaagaatggaaggaaaaaaatatgcatatatcttggaataaataatcaaaaaatcacaagagtaggtattcagatgaagggactttgaagcaagtgtgtgtgtgtgtgtgtgtgtgtgtgtgtatgacaaaaagaaacatgatgtaatgaatctgcaagaagatataacattcttaattgtgtatgcaccacataacagaacatcaaaatacatgaagcaaaaactgatagacttgaaatgagaaatagaaaaatccacaattatagttagaatttcaacatcccactattggcaactgatagaaatactagatagaaaatgaggcaggatataaaagaactgaacaccatcaaccaacagaatctatttgacatttataaaacattcccccatccagcagcagcagcagaatacatgttcttttcaagcatccttgaaaaatttaccaaggtagactatatcttgagtcatgaaacaaacctcagcaaatttaaaagaattttaaattttaaattcttttaaatcatacagactattttttttaccatgatggaatcaaactagaaattataagagaaaggcaacaggaaaacctccaataattggaaattaaacaatgcatttctaaataatccatggctcaagaggaagtcttattaaaaatacataacacaggccaggcatggtggctcacacctgtaatcccagcacttttggaagccgaggtggtcaaatcacttgagcccaggagttcgagaccagcctggccaacatggtgaaaccctgtctctactaaaaatataaaaattggtcgggcatggtggtgtacacctgtgcacctgtaatcctagctacttgggaggctgaaacatgagaatcacttgaacccaggaggcaaaggatgcaaagagctgagatctttccactgctctccaacctgggtgacagagggagaccccgtctcagaaaaaaaaaaaaagtagaacaaaattaaaataaaaacaaaccatatcaaatttatgagatcaagctaaagtaatagtaagaggaatatttgtattagtaaatatagttgacccctgaacaatatgggggttaggggtactggttccccaacccgtgccatgtagtaaaaaaagtgtgtataatttttgactcccgaaaaacataactactaacagcctgttattgaccagaagccttaccaataatataaacagttgatacacacattttatatgttatatatattatataatgtattcttacaagaaagtatgctagagaaaagaaaacattatcaagaaaatcataaagaagagaaatatatttactatttgttaagaggaagtggatcattgtaaaggtcttcatcctcatcatcttcccattgggtaaactgaaaagaaggagggaaaggaggcattggtcttgctgtctcaggggtggcacaggcaaaagaggtggaggaggtagaaagggagcaagagaggcagaccacactgagtataatcttatggaaatagatcatgatttctgtctgacttctttgcttcttcatttctctaaaaatgtttctatatggtatcaattcttcttctaccatttgctttcatttcattgcccctgtcacaaaagagtccatgttgttaaagaagtcaacagcagtcttaaatacttggaatcctttcatcggactgcctaatgtcaacctgttttctggcactgcttcttctatgtcttcctcataatctggcactggtttggaaacacctactgcaagccttcttctgttaactcctttgatgtggcatctattagttcttgaatttctccaagatctgtatcttggaacccttcatgcttcccccaccattttggccatatccacagtctctttcaagatgtccttgattggctctgtcacatatctggtgaagtcatgcataacatctggacacagttttctccagtagaaatgtattgctttgggctggatggttttcatggctttctataacaatgatggtatcttcatggaatggtataatctttccagactttcatgatgttctctctatcaaggtttctctcttccatagtatgacaatcctttctacagtgtcatgtttaataagctttaaaggtccttatgtcctcctgatctagaggctgaagtagagacattgtgtttgggagcaagtaggatgccttcagtgttgaactcattggggttctgggtggctaggggcatggttcaatttcaaaataattttaaaagacagttcctaactgccaaggtacttcctgactttagagacaaagcatctttggaactaaccccctctactgccccccaccccccaaaaaaaaaagttctcattgtccaggctgtcttgttacaggacaaccaaaagactggtagctggtgtttaccctttcctttcaaggctcaggggttagtagctttatagataagagcagtcctgatcataaatccagtgcattttcataaaacagtaaagttagcctgtcccttcctgccttaaatcctggtgctggggctggcttctcttccttatgaatagatgcttttcaagacttttttaaaaatcagaataaggagcttttgtctgcgttaaaaacctgttcaggcagatatcctttcttctcaatgattttgttaatagttcctggaaactcatctgctgcctcttggtcagcagaaggtgcttctcctgttatctttatattttttaagctaaatctctttctaaaattataacatcatcctttgctggcaataaattctccagctttagattattcgcattccttttgctttaagttgtcacataatgatttcccattttctcgaatcatgttagagtctataggtatgccttttttatagcaatcctgcacccacataaaagctgcattttcaatacaataataaaaagcatttcacaaaaaattaccaggtttttgtgcctactagtatagctgaaaagacagcttcacaagtttccttttctttttttgctatggtcctttgcctggaatcatttatcttgaaatggcagatgactgagcacactggcacatgcctgaagtcccagacacttgggaggctgtggcaggaggactgcttgagcccaagagctcaagtccagcctgggcaacaaagcaagatcccatttcttaaaaaaaaaagaaagaaagaaaaaaaggaaggaaggaagaaaatggtgggcaacagcagctttagacctcaatctatggcacctatcaagcaattaaactttttcttgtaatgtcgtgacttttttctacttcttgggagcacttccagcatcactagtggcacttagaatgggccccagagtgttattcaaggtttaaggtattgcactaaacactatgggaaatagatgagaaccacaagaaatcactttttactgagacacaaactgctcatggggagatgattagcctctcacagcactataagtagatacccttaacactagctcaccacaatagcaacaagaggaggctgctaaattattacaatagtctaacacacgctacaattacattttatgcaggtataatttaatattgcatccttacatttgtttacatttctctcaactatgaaaggtgtctgtgtttatgtatgtaagttctgataaattttaactttttctaacagatgtgtgtatattttatggtagtaagtgataaagtagactagtatttacatatattttatgcatgcataatatactgaactttaaaaaaatgatatttctatctcatacagtttgtgaattttttcaaattgttgcaaattcccaaaaaattttccagtatacttattgaaaaaaaaatccacatataaatcacagttcaaaaccattgttcaagggtaaactgtgcttacattagaaaagagaaaagttttccaatcaataatctaaattcttactttttgaaactagtagaagaacaagataaacctaaggcaagcatacaaaaggaaacaattaaatgaaaagcagaaatcaatgaaaggaaaataagaaaataaaggaaataattagaacgaatagctggttctttttttaaaaaattaataaattgataaatgtctaggcaagctaaccaagaaaaaaaaagagatgacacaaattaccaacatcagaaatgaaataagactcatcactactgttcctacgaagattaaaagaataatttaaaaattctgtgaactattccatactcacaaattttttaacttagatgagatggattgattcttgaaagacacaaattactaaaacttacacaagaagaaacaaataatctaagtaggcctacatttattaaaaaattgaattaatcattaacaaacttccaaaaagagaaagcatcaggcctggatggattcactgataaattctaccaaatatttatggtaaagactatgccagttctctacaatctcttccagaaaatagaagcaagatgcttagtaacaggccagcataacctttgacaaaatccaacacataatcacaagaaaactctcagctagctgggaactgccttaatatgatagagaacatctaccaaaaataaatagcaccatacataacagggaaaaaacagacactttccctataaagttgtcaacaaagcaaagatatcctgtcttgccactcttattcagcaggatacttgaagtcttatccagtgcaataagaaaagaaacagaaataaactttataagactggaaaggaacaagtaaaattgtctttgttcaaagatgacattattatcaatgtagaacatcccaaagaattgatcaaaaactataacaaaacaaagcaaaacaaatctcctggatttaataagtgagtataaaaggttacaggatacaagattaatatacaaaagtcaattgctttcctatataccacaatgaacaattgaaatgtgaaattcaaaaatactatcagtcaggtatggcagcttaagcctgtaatcccatcactttgggaggccaaggcaaaagaattgctggagtccaggaatccaagatcagcctaggaaacatagtgaatacactatctttacaaaaaataaaaataggcatagtgtcacatgctagcagtctcagttgcccaggaggctgaggtgggggaatcacttgagcccgggaggtaaaggctacagtgacccatgattgcatcactgtactcccgtctggggaacagagtgagactctgtctcaaataaataaataaataaatacggtttataatggcacccaaacaatgaaatacttaggaatgaaattaataagatacatatagtatctgtgcagaaaacaataaaactgtgattttaaaaaatcaaagatctaaataaatggaaggatattccatgttcattgactggaagactcaatattgttaaaatgtcagttcttcccaacttgatctatagattcaatgcaatcccaatcaaaattgcaggaagctgtttcacagatagtcacaaactgattctaaagttcatgtggaaaggcaaaatacatacaatggctcatgcaatactgaataaaaacaaagttggaagactcacacaaccaaattttaatacttataataaaggtatggaaatcaagacagtatggtattaatgaaaaagcagacacatagatcaagtgtaatagactaaaaagcccagaaatagagccacaaaatatagtcaacagatctttggcaaaagagcaaaagcaattcaagggaaaagaagtattttcaacaaatggttctgaatcaattggatgtgcatatttaaaaagagaatataaacacataccttacacttttcatcaaaattaattcaaagttgatcataaacctaaatgcaaaatataaaagtataataaacatccagaagaaaacatgagaaaaatctaagtgactttgggtttggcaatgagtgtttagatacaccaaaagtataatccaaacttaatgttatataaaaattaataagttaaattttattaaaacaaaaatttgtaagatacatatagtttctgtgtatagtctgggataaaatatttgcaaaacacatctaatgactttgggtttggcaatgggagttgacaaatgtatttcctattttctcaactataggaaaataactcaactttttttaaaactagtttaaaaatacaaggagaagatctgaacaaaaaactcacaaaagaagaaatacagatagcaaataggtaaatgagaaggtacacaacataatttatcattgaggaattgtaaattaaaacaacaataagatatcactatgtacctattagaatgactaaaatctaaaagcgtgataacatcaaatactgatgaagatacagagcaacagaaactctcattcattgcaacagggaatgcaaaatgggacagccatttgagaagacagcttggccacttcttacaaagcaaaacataaccttagccatacaaaccagcaattgcactcctatgtatctacccaactgactggaaaatgtatctatgcaaaaaactgcatgtgaatgtttataatagctttactcataattaccaaaaactgggaagcaactaagatagtcttcaatatgtaaatggataaacagattgtggtgcattcatacaatggaatatcaatataagtaatgcttaaataagtaagtatatgggaataagagacaaatctgtaagaagaattccaaataatgtacgtagatactctgccctcaaagacagggagagcacaattcctcattccttagagatggattgtgcttagtgacttctttccagcaaagtatactatgataaaatggtggtgggtggggagaatcaataactttatagtggggaaacctgacacccaacttcaacaacgttatgaaagtcagcatcaataacaatagaacatgttgatagtatgtactgttgacatgatgtgatgaaaatggccctctacctctgtggtcttcttccccaaaacccattttaattgtgataaaagctacccaggcaaatcatgataaaaacacagaacaatttccaatagaggagcatttgacaaaattcttgacaaggacttctgcaagctgtcaaggtcatcaaaacaagaaaagcctgagaaacttttatatccaaagaaatcctaaggagacaggatgactacatgtaacatggtattttggatgaaacagaagaaattttataaaacctaagaatatatgaatatagcatgggctttaattaataatactgtatcaatattcatttagtaattataacaaatgtaccatactaatgcaagatgttaatgacagaggaaactgggtattaggtatgtggaaactgtctgtagtatcttctcaatttttctctaaatccaaatttgttgtaaaaaataaatttctttttaaaaaataatagtcatttcacattactccactatgtccaactctccagcagctttcctttggatttagaatcaaattccaactagcttgcagcccttatctgagtgcctttgtgaagccttgtttactacttttcagtcaaactggtgttctttctgttctaccaacactccactctcattagcctttcagggactttgcgtacccacatttccccatatctccttgtttcttttgtccactattataatcctcagatttcaaatagtacctgaaacatagtacatgacaactggttggatggattgatgaggagatggattaatgaacatgactgttccaataacaaaccaatgataattgagtcttatgaccttgaagaagcttatctcactgcaattgtctactgatacattttgaagactcacaaaatactcaactgaatcgaaatattcgtataattttaaaaaattgttttagaagcaaaaatgtccacatgccctacaaatgctactaacctgtgtgtacatccctcttatccttagaccttatactaccttctagtgacttcttaagttaatggtctaatcacttcaaactaacactgaacaattaaggtaaacttacattaactgaatgatgtccactggacctcaatagaatttccaatgtcattttagacacttttcagacaatgtcacttggaattaaaaggaagaagttttacaactatgtagaaaataaaatttataatgatccacagggcatagcttgacctctagcagcttgcagtcaggaacagagacatggacaagaatgaacatccagataattgaacaaaatccaaaccacttcacaggtaacagtcaaggttaaacatatcttatgtatacaagccaacatagacccagtacttactacctgcagtaatttaacacttcttaaaatttcataatctctcttgcagcaaatatcaattttctttttctttttttttttttgagacagagtcttgctctgtttctcaggctggagcacagtggcacatctctgctcactgcaaacttcacctcctggtttcaagtgactctcctgcctcagcctcccaactagctaggaatacaggcgcctgccatcaatccagctaatttttgtatttttaatagagacagggttttgccgtgctggccaggttggtcttgaactcctgacctcaagtgatctgcccgaatcggcctcctaaagtgcaaacatcaattttcaaaattatcttccaaagtgcctcggggttttgtgttatagcttacataaaggtggatctgaggaacataagtaagcaagtcaacttaattggattttaggaggtctcaaccactggattttggaggtctaaccagcaagaaagattttattttgaataattacaggagagataattttctgtgcaaagaaaaagtatggaaaaaataacgaaaatgggaaccactattactctgcccacattaaatgaaaactcagttggtttcttgacatacaagcaagcaaactctaaagaaaactttgcacattagcaggatagtctagattcttgaaggcttaacttctttgcacttcaaaccccagtcttgcatgccaaacatttgatattacatcaacatcaccttgaaagaattctaactctggagacaatcagttaattaaaaaaaacacacaggggcatttttttttcttttttttttagacggagtcttgctctgtcacccaggctggagtgcagtggcacgatctcagctcattgcaagctccgcctcttgggttcatgccattctcctgcctcagcctcccaagtagctgggactacaggtgcctgccaccacacccggctaatttttcctttttttttttttttgtatttttagtagagacggggtttccccatgttagccaggatggtctcaatctcctgacctcgtgaacaacccacctcggcctcccaaagtgctgggattacaggcctgagccaccatgcccagccaggggaatattttttatgtataattattttacatgccgatctcaggaccttgattgtctcttctacatgggaactaccatggatatctaattttttggtataaaggaatacaggaatatacattcttctcaagctcatatggaacattcaccaaaatagactacattcttggccataaaatacacctgaacaaatctaaaagaataaaaataatatattgtctgctctgagatcacaatggaattaatctagaaattaattacagacagatagctggaaaatcccaaaatatttggagattaaaggacacacttctaaataacacattggccaaaaaagaaatctcaagaaaaatttaaaatattttgaattaactaaataaaataatgaactaaataaaagtaaaaccactacatattgaaatatgtggaatgtggaaaaagtgatgcttagagggaaatttatagcattgcatgaatatatttaaaaaaaagaagaaagatctaaaattaattatctaggttcccaccataggaaacaagaaaaaaaaagagaaaattaaattcaaggtaagcagaagaaaataaataatttttaaaaaacagaaagcaatgaaattgataaaaggaaatagaaaaaattaataaaaccaaaaggtggttcttttaaaaaaaatcaataaaatcaatagactgccatccagtgtaactatgaaaaaaagatagaaaaaacaaattatgaacatcagaaatgaaagaggggacatcactacagatccaatggacatcaaaattataataaaggaatggtatgaacaactttatacccataaatttgataacctagattaagtggaccaagtccttgacagacacagttcgctgtgtctgtcacgcaaactcacatgaaaggtaggcaatctgaataggcctatgcctattgccaaaatcgaatcaataaataactttgcaaagcagaaagcatttggtctactggtaaattctaccaaatacttaaggaagtaattacacggattcatttttttttacaatctctttcagaagacactgacagagggaatacagaaggtctctgacttatgtagttttacttaagatttgttgactttatgatgggtttatcagggcattaaattcatttttgacataccatgggtatcagaacacaaccccattgtacatcaaagagcatctgtacttcttaactcattctatgaggccaacattgttctaatacaaaaacctcagagacgttacaagaaaactgcaaaccaatacctctcatgagcatagatgtaaaactcctcaacaaaatactagcaaattgaatttaacaatacgtaaaaagaattatacaccatgaccaggtggaatgtatcccaattatatgaagcttgttcaatatttgagaagcaattaatgtaatccagcttatcaacaacctaaaagaataaaaatattgcataattatatcaatagatacagaaaaggcatttgaaaaaatccaatacccattcatgataaaaagcactcaacaaactaggatagaggggaacttcctcaatatgacaaagcatatttacaaaacacttacagctaatattatagttaatgggagaaaaaaccctcttagtaaaatgagaaacatggcaaggatgtcctctgttaccactgctttttaaggtggtggtagtggaaatgctaactaatgcaataagaaaataaaatttctaaaacgatatgcagattgggaagaaatgaaactctgtttacaagtggtgattgtctgggtataaagtccaaaataactgacaaaaaaataagtaattttagcaaagttgcaagatacaatattgacatacaaaagtcaatcacttttctacataccagcaatgaacaagtggaattgaaactaaaaacataatgccttttacattatcacccactagatgaaacactcaggtataaatgtaacaaaatacataagaaatatgtataaggaaaaccacaaaactctgttggaaaagtcaaagaataattaaatagagatatttcatgtttatggataggaagactcaatattgtcaagatgtcagttctcaacttgacccatggatttaatgcaatcccatcgaaatcccagcaaattattttgcaggtatcaataaataattctgaggtatatgagctgagcatggtggcaaatacctgtagtcccagatactctggaggctgaagtgaaagtattgcttaagcccaggaattcaactccagcctgggcagcatagtgagacctcatctttaaaaaaataaaataaaataataaagtttatacggagaggtcaaagacccaaaataatcagcacagtatgaagaacaaagttggaagaccgtctctaaccaacttcaagttttactgtaaaaccacggtaaacaagataatgtggcattggtgaaagaacagacaaacagctcattagaacaaaatagaaagcccggaaataggcccacataagtatagtcagcagatttttagcaaaggaaaaaaggcaataaaatggaacaaagatagtattttgaacaaatggtgcggaaacaactggacatccacatgcaaaccaaaaaaaaaaaaaaagagtctagacacagaccttacacccttcaaaacaattaactcaaagtacatcacagccccaaatgtaaaatacaaaactatgaaactcctagaaaacagtataagagaaaatccagctaatctagagtttagcaatgactttatagaccaaacaccaaagacacaatccatggaataatgaagcaataagctgaacttcattaaaattaaaaattttagccctatgaaatatgctgtcaagaaagtaaaaagagaagccacagactgggagaaatatttgcaaaagacacatctgataaagaactattattcaaaatatgcaaagaactcttaaaactcaataataagaaaatggctcatttaataaattgtgccaaagaccttaacagacacctcaacaaagaagatatgcagatggaaaataagcatatgaaaaggtgctccatgacatatgacataaggtaaatgcaaattagtacagctgtgatatacactacacacctgttagaatggccaaaatccagaacactgagacattaaatataaggatgtggagctaaaggaactcattcattgcaggtaggaatacaaaatggtacaatcactttggaaggtaatttggtgatttcttacaacactaaacacactcctgccatactatccagcaatcatactccttgatatttacccaaaggagctgaaaacagatacacagaaaaatctgcacacagatatgtatatcaactttattcattcatatgtgccaaaacttagaaaaaatcaagatgttcttcaacagatgaatggaaaaataaactgtggtacatttagacaatgaaatattatttagtgctgaaaatcaatgagctatcaagtcataaaatgagctatcaaaccgtaaaaagacagagaggagtcttaaatgcatattactaaatgagaaaagccaatgtgaaaaggcctcatactgtatgattccaactatatgacattttggaaaaggcaaaagaaggtagacagtaaaaagattagtggctgccaagggttagtgggaaggcatgaacagactgagtgcagaagatttttaggatatgaagctgctctgtacaataccatgatgataaagacgtatcatcataaccggtctgaatctgtataatgtacaacaagagtgagccctaatgtaaactatgaactttgggtgataagtatgtgtaaatgtaggttcatcagttataacaaaaatgccaccttggcaggggttgttaacaatgggggaggctgtgcacatgtggggaccgggttgtatgggaaatctctgtgtttgctgctccattttgctgtgaacctgaaactgctccaaaaataaataaaaataaaatgagattagatagaaatagatgtagataaataattacagacagttacagacacagatagatacaagtacagatagatacagatactggtatagataaagatacagataaaaatacagatacagatagatgatacagatacagatacagatagatacagatatagatacagatacaagtatagatacagatatagatccagatacaagtatagatacagatacagatagatgatacagatacagacagctacaggtacagattgatgatacagatacagatacaaatacagacagatacagatacagatatagatagatacaaatatagatacagatactgatagatgatacaaatagatacagatatatatacagatacagatatagatacagatacagatagatacagatacagatataagtacagatacagatacagatgtagatacagatagatacagatacagatatagatgcagatacagatacagataatgcaaagtgagtttagaaccaacgtctgcaccataagcatattattatgtgactgtgtccacattaaaggaaaagtgtgccctacagaaaacttattgatgccaatgtggctatgatgagttatcaacaaatagaatctatgctgaactatcatattttgccctccaaggccagtgaccagtgccaagttaacctgttaaatcccaaagcagaattatgtgaccagatggaaaattccaattgaacatctgtgttacagaaagaatggggccttccacagcctggctgaagatgcagaataatacttgttagtagtcatatctcaaaatgagaaaagtggctattccctttgtatggagctgtgaatcctgaacttttcttcatcagcaacttcttaaacatctttttcagtgaatctcctgctttggaatactgcatctatgacacaaagcaaagtaacaaataattcattttctcactttttttccttttataggtacataatattttacatatttatggggtaagtgtttgttacacatgtataatgtgtgatgatcaggtcagggtatttggggtatccatggtaagtactcaagtacttatcatgtctattgttgatatcgttttaagtccactcttatagtaactttgaaatatacaaactactgttgctaagtataatcaccctggtctgctatcaaacattagaacttatttatttcatctgactatatatttgtacgcaaactctcctcattccctcactcctactcactcacctcctcttcccagtctctggtagctgttagtctattttctatgtccatgagaacatttttgactcccacatatgagtgagactatgcaatatttgtctttctgtgcctggtttatttcacttaacataatggcctcctccagttccacccatgttgctgcaaataacataatttcattttttatggccgaatagtactccattgtgtgtacataccacatcctctttattcattcatctgctgtggacacttaggttgattccatatcttggctattgtgaatagtgctgcaataaacacgcaagagcaggtctcactttgatatacagatttattttcctttggataaatccccagtggtcgattgctgtatcttatggtagttctatttttagttttttgagaaatctccatactattttccatagtggttgtactaatttacatttccaccagcagtgtatgacttcccttttctccacttccttgctagcatctattactttttgtctttttagtaatagccatcctgactggtgtgagatgctatatcactgtggttttaatttgcctttccctgaatgattagtagtaatatcgagcattttttcatagacctgttggccattcatacatcttctcttgagacatgtttgttcccttcttttgtccatttttaatgggattatttgttttttcactatggtgttgcttagttccttgtatattctgggtattagtcccctggaggatgtgtagtttgcaaacattttctcccattcaagaggttgtttcttcacttttttgattgtttcttctgctgtgaagctttttagttttatatagtcctatatgtctacttgttttaactcttctttaatctaagacatgtggttgtcaatcagagctgcagattatcctaaaatgaccaccactagctgagttgatagacttcagaacaaaaactaggcccttgatggcctcttcagccttcagatacctcttaagaaaattcgttgttctcctttaaagattttgaagtactgaaaatagttggaggccaggcatggtggctcacgactataatctcaaaactttgggaggccgaggcaggcaaatctcctgaggtcaggagttcaagaccagcctggctgatatggtgaaaccctgtctccactaaaagtacaaaaattagccaggcatgctggtggacatctgtagtcccagctacttgggaggctgaggcaggaggatcacttgaacccgggaggcagaggttgcagtgagccaagatcacaccactgcactccagcctgggggatagggcaagactccgtccccccaaaaaaaaaaagttggaaaaattcccatccgtatttttaaagttctctatgagtttgaagatgtccaggttaagaaatattgaaatacttgagtcaagaaagtagaaagagaacctgttatttcagaaggattcagatgttccaaggaaaattgatgcatagtgacacagtctgtccaagatatgggttgactgttacctggattctgggatataatactgtacagttattagttaaccaaaaaaaggcatttatggttgttagcagcaaagaaatatatgatgttgtctccaaatgttactaaagtatcattcaatcccagaagaaaatggaacaatatttataaaattctgaaagaaaaagtaaaacaaaaaattgtcttttagcccatcacaaacaggttgttttattaagaacagattagtataattcagcaaggttggctaagggttttaggacataataacaacgtattgtgtgcttagaaaccactaagagatattttaattgttcttaccacaaaaaaatgataaatatgtgggcaatgcatatgttaattaatttgatttagacatttaataatttatacatgtttcaaaacattatgttgtacacattaaatacatgcaattttgtcaattaaaaataaataagtgagttttaggacgtagtctggttacaataatggaagacagtcatagctgctaaaatagcagctcatctttcctgtagtttttgattgcctaatattcaatctcaagtacatggtaaacatggatccttcttatggagatgaatggaattttttattttagtgaactttccttacataagtttacctcctaagagtttacaacatgatatccaatccattgtttcaactgatgaggaattatagtccaaagtgtactatggagttctgagattttgacttacatggagtagcttatagagcatccgatctcccattgaactagaaaatctagataaaatacacaaagggatgtcttctagaagaatcagaacgttaccaaagcaatcaggattaagaggccatgaccccggaagggagggaagggatgtgaaagttagcccaacattacatctactaattatccccttggaggatttaccaatcctccttggctgcaaagagcaagaggcctgagatggcatatttaatttttccttaatttcacaggctaagaacataaaaattggaattcaggactgtcactctagctaaacataaacagccaagtttccagagagtaggagtcacagacatacatctggcactctgcacctgttttctccttgagacatttactgattccaaagctttgtggggctagagtccctgaagccaagcaaagagaggaagaaaagctgaagggaggttttggctatcttaccatgctaggaatacaaaaattaaagttcagtgctcaccaatgaagcaatacactggtaaatattcaggctttcagctgagatgcctgaaggacaaaccagagatagaatcagccttacaaacagtgaaacccagacaggagtcagctcagttctggattgaatcaaattggtatgtttatactctcactgtcatgtagaagaagataatcactgaaagcttctacaatttttcagagagtatgtctggtataaaatttaaaaattatcaagcacagaaggaaacaaaaccaagtggggggtggctagaaatcatacaaataggaacatcttcatagatttaaggttatcagacattgactaaaataactatggttagcatgttcaggaaaataggcaagatgaagttctcccaagaatactttttaagaataaaatgtaattctagatctgaaaaattttaatggctgaaattgtgtactcaatagaagtgtttagtagcaaattaaacacagctttaaaaaataagtaaattggaaattaaaacaggagccaattcacttaaaatataacagagaggaaaatatatgaaaaatacagaagaaaatgtaaggggaacatgtggtacagtaaaaatgtttaatatactactgattaaagataatgaagagaggaaagagggaaaggggcatgagcaatatttgaagagataatggccagtaataattcaagaaaagaatttgccaacacaacatcataaatgggaaaaagatttccaactgaaaatcaagaaactctgcaaatgttaggcaaataaatatgaagaaactacaactcagaatatgagcgcctaactgctataacaaaaagaaaagtcccttaaaaacatccagaaaagaaaagaagtattaccttaaaagtagcaatggatggactgacagctgacttctgcaaagaaatgatggaagccaggaaaaaatagaaggctatgaacaacaattgagtcaaagaagaaattaaaacataaattttaaaatatcttgagacaaacgaaaatggaaacacaacgtaccaaaacttatgagatgtagcaaaagcagctctaaaaagaaagtttatagcaagaaatgcctataacaaaaagaagactgaatataaatagcttaatatttcacctcaaggaactggaagaaaaagaagctcagaggaaggaaatactaaagatcagagcaaaaataaataagagagactattcaaaaataattcaaaagatcaacagaactgagttgttcttttttgaaaaaaattgataaaccttcagctagactaagggaaaaatgaggactcaaagtcagaactgaaagaggagacattaaaaccaataccacagagatacaaagaattataagattactatggacaattgtacatcaacaaatgagataatctagaatcgagaaaattcttagaaacatgcaatctaccaagactaaatcattaagaaacagaaaatctgaacagaccaatgagtaaggaaattgaaacagtaataaaaagtctcccaacaaagaaaatcccaggaccagatagattcactgctgaattctacaaaacatttaaagaacaactaataccaaactctaccacaaaattaaggaggaagtacttccaaattcattttaaaagtccaggactaccctaataccaaagccaggcaaggacactacaagaaaacaaaattgtaggccaatatccctgatgaccatagatgcaaaaatcttccagaaaatattagcaacctgaattcaacagtgcattagaaggattattcaccattattaagtgggatttattcctgggatacaaagatggttcaacatatgcaaatcaatgaatgtgaaatagcccattaacagaataaaggacaaaatctatgtgattatttcaatagatgcagataactcgtggcaaaattcaacatcattttatggtaaaaattctcaacaaattagttacagaaggaatgaacctcaacacacaaaaaaaggccacatgtcacaagctcacagttcacacaatactcagtggtaaaatttgaaagctttgtctctaagatcaagaataaaacaaagatgcccattctcaccactcctaaccaacatagtactagaaatcctagccagagcaacaggcaaataaaagacatccaaatcagaaaggaaaaagtgaaattgtctctgtttgcagatggtgtaattttatgtacagaaaatgctaaacgtgtgaaaaaattgttaaaactaataaatacagtaaagttgtagaacacaagatcagcatataaaactccataatatttctttataataacaacaaacctattaaaaaattcaaaacaatcctgtttacattagccacaaaaaatttaatagcttgtgaataaattaacctaaggaggtgaaagatctgtatgatgaaaactacaaaacattgataaaatacattgaagaaaacacaaataaatggaaagatatcctgtgttcataaactggaagaaggaatattattgaaatgtgcataacacccaaagcaacctacagattcaatgcaatctctgtcaaaactccaatgacattttttacagaagtagaaagaaatcctaagatgtgaacggaaccacaaagtaccccaaatacccaaagcaatcttgggccaaaaaacaaagctggaagcaacatgctaaatgattttaaaataggatacaaagctatagcaatcaaaacatcatggtactggcattaaaataggcacataaaccaatggaacagaaatgagaggccaagaataaattcacacatttatagatttggtcaacaaatatttatttataaataattgaataaatataaatgtttatattggtcaattgatttgtgacaaaggtgccaagaacacacaatggggaaaggacaaacacttcaataaatggtgttggaacaaattgcatatccacaggcacaaggatgaaatttgactccgatcttgaaaacagctttgcaaagattatgacagtgacagaagtctagcaaggctgactctgtcttgcttctaacaaatgatccagcaaccccactacttggtatagatccaaggtaagtgaaatcagtacgttgaagagatatctgcactcccatgcccattgtgttcattgcagcattatccacaatcactaagatatggaatcaacagaagcatctatcaacagaggaatggataaagaaaatgtgggatatatacacaatggaatagcattcagcctgaaagaagaaaatcctgccatctgtgacaacttggatgaacctggaggacactatgttaagtgaaataagccaggcacagaaagacaaatatagtatgatgtcacttctacatagaatctaaacaagttgaattcatagaagcagaaggtagaatagtggttgccaaggcaagagtgagaaagaaagacaggttgggagataatcaaagtatacagaatttcagttagacaggaattatttcatgacatctattgtgtaacacaataactatagtaaataacaatgtattatatacttgaaagttgctaagagattagattttaagtgttctcaccacaaaaaagcatgtgaaataatgcatatgttatttagcaaaatgtagcaatttcacaatgtatacatatttcaaaacataaatgtacaccataaatatatacaattttgtcaagtaaaaattgaaaaattctagaatgaataataagaaaaatttacactttgattttgaattacaacaaaaaactagtaagtaaaaaagaagatagaaagttaagtataaatgtcagaaagaattatcaaactagactttataaccactgaaaataacttttaagagattgggccactgcacaaagcaggactctgtcaaaaaaaaaaaaaaaaagagtggaaagttggttccacttgtgataaagatagagtaacagaaactgaatttaccttctggccttaaaaattaaaaacaaaacaaaacccaaaatttgtatcaagcaaggtattttagacactggacaacaggcagctcaggacaatgattcccaagtggatacaaacaaatgaggtgacccctacagtagcttaagacaaagattgtcagagtgaatttaaaaatataagccaatacttatctatactctatctcaaagaaccaaactttatataaatgatagccaaggaaaattataaaatattttgaactgaatgaaaatgaaaatcttttgaactaaatagacaatatattaagatgtatgggataccactaaagcaggtattaaaggaaaatttgtagcattacattctagcacaagaaagaagaaatgtctgaaattaataacctaagcttacactctaaaaagctttgaaagctttgtctctaagatcaagcttccactctaaaaagttttgaaaactttgtctctaagatcaagcttccagtctaaaaggttttgaaaactttgtctctaagatcaagcttccactctaagcttaggttattaatttgaggttacttcctggagagtttccaggtcatactgcaagaaagggaaatccaaagagagctcagtgagctccctgagttaaggagacaaaattttcaagttaaaaaaagaggccagaatccacagggcaggatacagaataaaagatttctgcacaaagagagttctggagatctggagagagttctcctcaattcttcatctcagcactgatcagcatatttgtgtgaggaaaatgcacaaagccagggaaaaaccagaaaggatcacgttttaaaataataaagatcacatatagctagaaataattcaccttcacagcagccaaagtggagaagcttcaaaacacacagggctttgggtggagcactcagaaggtattgcctcggtattggagctataggagccctagactaaaggctgctcctgcccagtctaacaaaggttaagagtaaggatatgaaaacagtgattattagtatgttgcatctttcaagaagacaaaacaatgcatgagtatgttaagaagagacatggaagatatttttttagactgaagtagaaaaataagtacactatccaaaacaaaacacagaaaaataaaaagactgaaaaaacttacattgcaatgtggaaaactctaagtggactaatattgggggcccagaaagcataagggcagaaaaatatttgaagacatagtggctgaaacttttccaaatttcatgaaaattgtgaacctgtagattaaatgaattcaacaaaacccaagcacaataggtatgaggagcactataacaagatctaacataatcaagttgcttaaaccagtgataaagagataatcttaaaatcagccagacagcaaaaaatacattatatacagagaaataaatagaatgatagcagttatgctcaaaaagcatgcaaaaataaaatacagaatataaccattaaatatatatgtcagaaaacagtacatctttaaagcactgaaagagaaagtctaacctacagttttatacccagtaaagctcttttggataaataaaggtgaaataaaggtctttcagacaaagacaagctgaaagaacttatcatcagaagactagtatcataagaaatgttaaagagaaaatccttcaggaaaaaaaaactgataccaaatagaaatcagaatctacacaaaggaattaagatgggaagagtatgtatgagggtgaaaattaaaaacttttcaaaagttttgcaaatcttttttagaagataatcgattgtttaaaacaaaataataacaatgtataatggagtttataacataagcaacatgttatcagagtaaaatatattatgacaatagcaaagagacttggaaaggaagaaacagaagtgattgtgtaaggttccttgccataagaaaagtgttataatatcatgtaaggcagagcatgataagttacagatatagtctgtaaaccctaaagcagccacaaaaatagcacaacaaagtgttatagctaataagttaacaaaggagatgaaattgaatcatgatattttcaattactacaaacaaagaaaaagaggagaatgggaagagaacaaagaaactaatagaaaataattatcaagatggtaaatttacacatgactgtattaataatcacattactcataaatggcctaaacactccgattagaaggcagagattgtcagaatagattaaaaatataaaaaatacacatctacactctatctcaaagaatcatacttcatgtaagaaacaaatgggttaaaagttaaatgatggtcaagggaagttataaaatattttgaattgaataaaaatgaaaatcttttgaactgaattaacaatattttaaaatgtgtgggataccactaaagcaagtattagaggaaaatatataacattaaatgctaatacagaaaataagaaatgtctgaagttagtaatctaagctttcaatctaagaaattagagaacaaaacaaaacaaaaacaaattaaaccaaaggcaaagagaagaaaataaataataagtgcagaaataaatggaattaaaaacagaaaaataatccagaaaaaacagaatcaaactggttttttgaagatatcaataaagccaataaacctctagccagatgtactaaggataaaagagggagaaagagagaaagagaaagagaatctcctgtatccggactaagaaggaacatcattacagaccctgcagacataatagtaatcataacaataaagattagcctgtgagtaacctgtgtctgaatccacaaggagctagtcaatagtttagattcctggggcccatcccaatcataatgaataaaaatttcagggctaatcagaagaaaggaacataataataatgataataataatagggtttgacatttttgcaaacactccagatgactgatgcaaagttgagctcaaggtgcactgccttagattaaatagagtcagctagtctccaagattcatgactaggaaaattaaaaaataggtcatgctctactgacttccctgtgaagtctagatctgcactgtctagaaacaacctgtcagataaaggggaagctgatgtgaccaacaatgacatacccatgaatttaagactctctccattttctctttacaagttatgcatgttgaaagtgaagctcaaataggtggcaccatcccaggcacatattccaagaagcaaaagactaaaattgtctgccacaataaaatagaataccacaatgatacattttggtatctgtccacaaaaccttcttcaggttctgcctgattactagatttctaactgtaacataaaccccttttcctggaaaacaattgaaagcaaggaagttaaaacaatattatgtgggacaaaatataagtctgcttgacatcttttaagtaaatcacatacatacgtatttgactctcattagtgacaagtgattcttaaaacttagaaagatgctttagctaatcacgataccctcactgcaagctcacagcagccaaagattggcctatctgctgtgcagagaaggatattctctggtcacagcccactcctcaaaccccaggggttcccagtggcccaggccgaccagcatactggcatgatacagcctattacataccgtttaaataaagatttgcaaggaaaatgaattcatggcaacattcattattgatcattctcaaaactgtctggagaattcccccagagggcttagggaagaaattaaacattgttttcctgaattgtttcctgctgttttcccacttcactggttttgctcccgtaattgtgtgtgatcctatagccacaaattttaatatgcctgaattatttcatacagcttctggatcacatgtcaataatttgggtgtgaataactataataatgatgttaataataatcaccatgatgaggaaagatccttagagttccctgtttactgttatctcttaactctttaattacgttttgtctgacctaaatctactgcatcaaaatctgcaagtaataaattccaagttatttctagtctcacctgcccacccttgaccactgcctctttcctggagctcattccccctttcttccccctactattggtctcttatggttttccttctatttctctgaccttctagatcctcgtcaccatttttatgagttcagaaatttggactttttttttttttgagacagagtcttgctctgttgcccaggctgcagtgcagtggcacaatcttggctcactgcaacctccacctcctgggttcaagcgatgctcctgcctcggcctccctagtagctgggattacaggcatgcgccaccaccccaactaatttttgtatttttagtaaagacagggtttcaccatgttggccagggtagccttgaactcatgacttcaagtgatgtgcccacctcggcctcccaaagtgatggaattacaggcatgagccaccatgcccagcccatttctcagaattctaatcagtgttttctcatgtcatttcaaacactctccttagcctctcacctccttgcctagcttcaaacaacatcagtctacatatccagaattcacatctttgatgcaagactccaggtgtcatgcctccacagctcagttaaccatctgatgtcacctcccactactgtctcatgtgccctatgctcccaaaccaactcctctgctcacggctcagccagctttcccagtgcctttttatacccacagctttgacttcctggtccttcttcctaaaacgctttgaaaaatcatatccagcagtatatcaaaaacagcaaattatccattatgaagtttgtttaattcagggaaagtaagagtggttcaacattagcaaatataattttaatataatttaagatatcaaatatgacaaaggaaccaatatatctattgttgaggaaaaaaaattgaaaacattcaatcgtcattcctgattttttaaatgtatagaatactgaatataaaatgctaacttccttacatgatttaaagaaaaaaacctgtcttgaaccaatcttcattcattatacccaggaataaaacatttgcaacatcccttcaaagggaaaatctttataagaacattcattatcaccaccactatttaatatttctctgaaagttctatctaaagcagtgagacaataaaattatgtacaaaatataaatgtaggaaagaaaaaacaggggttgatatttatatattttatgattatttcccttaaaaaattatctaaaaatctagtagagctaataatataatttaataaggtgtccaaataataaatattaacaatgaatcactttcatgaataaaataatgatcagttagaaaatataaccaacaacctatcagaatgaccaggatcagttggggtaaaaagaaaattccagacagaaatactctatctatctatctatctatctatctatctatctatctatctatctatctatgttacctatgtctgaatccatccacccatccatctgtctgtctatctgtctacctatatacacacagctaacccttgaaaaatgcagtggttagggagaaccctaaccactcaatcaaaatccacttttaacattcaactcccccaaaacttacttaactcctaataccctcattaatctatctatctatccatccatccatccatccatctatccatctatatctatatatctatatccatatctgtatctatgtgtatagatagatatacacacacatatagctgaccctggaacaatgcagaagtcaggggaccaacccctcacacagttgaaaatccacatttaactttcgcctccctgaaaacttaactactgatagcctgttaacccaaagccttaccaataacataaacagtcattattttaacacattgtctagtatctacatatattttacccattcatgacctgcctttttcttgtttttttcaatatttctagagtacatggctcacctgtgggtttctttttcaaattgttgcaaatctcccctaagtttttcattaattattgaaaaaagaatccatatataaacgcatccatgaagttcaaacccatgttgttcaggggtcaattgcatgtgtgtgtgtatgtatatacatatatccatcacatatactcagatataaagatattcatgccaagattatttctctattcatctgaatcatgactataaaatttttttgaaaatacgataaatagtaaaggattttcacaaaagttcttccaataagttggtttgttctgatgagaataaaataacagctttatgttggatgacaagtttaaggccaatgaattatgcactttagaaggatgaatttatgatacgttaattatatatcaatacaaaattttaaaattaaaatactacatgtactacctctaaagaggggactgcttattctcacatggcattctgcttacccatgcatagggcagcacagacatagacacatacagctctacgtatgtgaaccaactcaacacagcttcccaacttggtactggcaataatgagatcttcaccttccatgcaattccccatggtacctggtagaattccactttatacctttatataagaatctcactttataactcatcctttgacatcttatatggccacacgccatgctcattcgtgtgtgaaagtgcacgtggtactatgattttttgtaccccgtagtgccttctttatgcctctccgattctgttttgaggaaacagaagctctgagaaggcaaggggcttgcccgagttcacaagaatagcaacttccagacctgggacttgaacctaggtctctagattgcatgccacggttgacgcagccctatggccccgggcatgcgcttctcttcttcctacatgaaagccctccttacaagccttccttgtaccctatggctccaggatctggccccttcacctccccagagtcagagttaccacggtgcagtggcgcaccagtgggcctccggcaatgctgctcccgcttcccaccttccagtggcacttaccagagacacccagtggtaagaattaactggggaatggccctgcccctgctcaggccagctaaacagaagcatttagagcagcaaaaagggcgctttcgttctgaagaccccgcaggcccttccaacgaggccagtttgggaaggagggcatccccttagtggaccttcacagccacactctcgacattggctccagagaatccatgacggggaaaactcatgaaagcctggacaacagacagagaaatctagccacgtgattctgaacacgaattcaatttccaaagattatttctagggggcgtaagaacctgaggcgcaccccgaggaggccagtagtgagtgatgtcagacttccgaaagttctatgtaaagcaatgagacaataaaagtaagcacaaaatataaatttaagagagaagaaaaaagtgttcattatgtacgtattttatgattgtcttcctaaaaaaaattatctgaacatcaattagggctaattatagaatttaatgaggtggccatataataaacattaaaaattaatcacttttgtgaagtaaagcaatgaccagttagaaaatataaccaacaacataggacgatcaggaggagttagggtaaaaagaaaattccaaacacaaacacactatctatctacccatctgtccgtctgcccatccatccatccatccctccatccgattatctgtctgtccatccatccatccatccatccatccatccctccatccgattatctgtctgtccatccatccatacatacatctatctatctatctatctatctgcccatccatccatccatcatccatccatccatctatccatctatccaaccatccatccatccatctatctatccacccatccatctgtccatctatatattcatctatctatctatctatctatctatctatctatctatctatttatctatatctatctatgcattcgtccatctgttcattcatccatccatccatccatccatccatctatctatctgtctacctatatacacacagctaacccttgaaaaatggagtggtcagggaggacccccctcactcagtcaaaaatccccacttttaactttcgactccccaaaaacttacttaactcctaataccatcattaacaaataaaagcaagcaaatttgaataaggtaacgtttgggggcatatctaactagcaaagatgtcaacagcacccaggattgatgagagcacaggaaatgaacactctgaagggaaataaaagtccaggcaaactttctgcagtggtcccattgttgctctcccaggaatgcgtccttaggaatggtcacatgtgtgcagaactgaatttccaagtccgtctagtgttgcagtatttacagttgcaaaaagccacaaacaatctaggaatctaacagaaggggttaaggcgactaaactagtgggtggattaatagaaaaaaatactgtataaccatttttcttaatgtggacctgtgttcatggactcagaaaaatatccgtaatataaaattaagggagagaagaaggctgtaaacagcacatgcgtgagccctttttgttttaattaaaaattacatatataacatatatgcatatattatattatattatattatattatattatattatattatattatatatatttatgtatttgttcttcttggaaacaaagatgtcaatgaatgaataccaaattactaacaatggttatctttgaatttattttcttttctcttattcattctttctctctctagatttttcttttattttttgagtgtctgtgtttcctttctatgattatttttatatttataaaaatatgtaaatatttttacatatatgtatatcagatgagctttccagaaccttctgccactctcaggaaagagcacgctgaccaacagcgggcgcaggtggaaagtgaaggctcagagcattgctctgagacttgtcctgggaggctcctggtctcctctccagcttcctgctcacagagaggcgaggctggctcaggccccgacggtgacgctgacgacggcgacagggaggtgtgcgaagccgggcgcgagctgtgccagctctcgctaatcctctgcagtatggttcgctgctaatttgtcatggcacatatttgccttatgtctaattagcatcaaattgcaaactgctatttgctaacaatttgttgcatcaatctgcttgaaaatctatagtttagaattggattacaacttatcctgtctatcaaaattctagttcacacatacacaaaataacttccccttcccgccaaaaacgtcgcaatgtttgcagtggcacaaaaggagagcgatgtgtttttttttccccaaaagaaagaagaataactatggggtgtctcattttgaatgtcctggctttggtttcccatggcctgggaaaagagctggaatagtgctcacactcaaaaagggtgctccaggcctttctcagggactttccaggaaagtcaagacataaaaaaggcccagaagcccagtcttctcaagtcccagacatagaactcccaggcaaaattgtgcaaagaacaagcccatacctgctgagggacacaacctcaccccagggttttgcctgcattcgctcacataatgctagcaacctcctaaggaagtaggggttaacatttttcttatttacaaattacgaaactcaagttgaaaggctaaatcactcaaggtcacatgtgtggcaagtggcagcacaataattgaagcccaaccgtgatgtttcattgctaaggtgaccctctaaatatcaaaaaataggcagtaggaataacaatgatataaaaattataaaatgagatataaataaaaataatagaaaatgaatgaaataaaaaggaaataacaattaatcattgcatttcacttgatagtttggccttatggagacatcatctagttggatgttgaagattttggtttggcaacatgccctgtggacagatggaagactccgggcctcacatgctcatagccttctcgtggtctcaaaagctacctcctgtggtccatctagaaggaagaactgagataaactccctcgcagagggacgatgcctatgggttccaaagagagtcaaaaggtgacattgggttgagacatcccttctttcctgtttcttgggcaaggagagacatgtttccaacagatggaagttggagctctattgcagagcacaggcacagaagtcgttacattcttagcccagtagctagttgactaaagatgtgccatccattaaaactcattgacctcacaagtggtgaccaaggggcaagaggctttcatggtgtccactccagctctccttggcacccccaaagaacgactttgctttgaaaaacaattcataaaatcattgttattattattataaatattcaaaacctagctgaacacagtggctcatgcctgtaatcccagcactttgggaggcccaggtaggcagatcactggaggtcaggagttcaagaccagcccggccaacatggtgaaaccccatctctaccaaaaatacaaaaataaaataaaattagccaggcatggtggcacaagcctataatcccacatacttgggtggctgaagcaggagaattgcttgaacctgagaggtggaggttgcagtgagccaagattgcaccacctgcactccagtctgggtgacaaagtgagattccgtctcaaaaaaaaaaaaaaaaaagaaatcaaaacctctccttttgtagcttctcctaataatcctttgggctggaaataaaagatcatctaagagcatcttcaaaaaagacctagagaaatcacaaggaaaatttaaaaagcagttatcttccccacacccacgaacatggtcagtggccatgagtttgatatgcaggactgatattcctgcgaaagatgtttgtggagtacctgccagctgtcacaacctgtgttaggtgctgaggacatggaaaggagtagggtgaaccaagccatcacagaacacaggacgcagaggcatgaggaaactcaaggccctaagacgagttcttgataaggacaaagtctagtgaatgcacgtcagtctagagacagacaaacagagaaggcttcctagaggaaaagatgcctgagctgaaacacaaggacaggtgcatgggatgaaaggatccttccaggctaagtgatgcacatgtgcatgccattccccaggaactgaagcatctgtgagttgcagaggccaccccctggatgagcagtgtcaaggttgagaccagggtccccagactgtcttctgccagttgaggaatcccttccaaagagcagggtcttaggatgcctgtaaaagacatcctttctcatctcccttgagggtaaatcaatctctctgttgagctcactagaggagtcaagcaaaaggaagaaagattctaagccaactcagcaagacacaggaagcaggttaagaagctttcttcacttgtgttcttggaatgactctttcacataataagatgttcagtgagggtttgccccatgccagattcaaatagaaatgatgctaccagcctctgtccagatgcacgtttctctatattttgaatggaaggaggccagacactgcatagatctgtaaccagcaaggaagcaaaccaaaaggtgcccaggaaaaacaaataatccccaaacagttgcctccagaaggaagaagttcatgctaaagaactgtgcttggggcttgtgtgttcaaggccagtcagtggggcagataaaccttcagcctccccccaccacacatagacatacaagctcaggaactaggacaggcagggaacttggggttttgaggcagccagagaggatgatcagaagagctgtccagaggctagacacagtcgtctccccaggacaacagggtcacccttgctcagagcgtgctgtgtaaaatccataccataagacttcctttgccagcacagcagagtgacagcaccagccagcaagcccaagacatggccacactgacctggcatcctagaacacaaagccagtatgtcctttaatcaaagtctgagtaatctctttggattcagtttaagttagcctgttctctcactactataaaggaatacctgagactgggtcatttgtaaagaaaagaggtttaattggctcatggttccagaggctgtacaggaagcatggcgccagcatcagcttagcttctggagaggcctcagaaaccttacagtcatggtggaaggcaaagggggagccaacagttcatgtggccaaagcaggaggaagagagagaggaggcaggtgctacacacttttatttttttccaagatggagtcttgctctgttgcccaggatggagtacagtggcactatctcagctcactgcaacctccgcctcctgatttcaagcaattctcctgcctaagcctcccaagcacctagtattacaggcatgcaccaccaggcccagctaatttttgtatttttagtagagacagcgtttcaccatgttggccaggccggtctcaaactcctgaccttgtgatccacctgccttggcctcccaaagtgctgggattacacttctaaacaaccacatcttgtcatgagagcagcattaggagatggtgttaaaccattagaaaccacccccatgatccaatcaccccccacctggtgccacctccaacattggggatagtgactgaacatgatatttgggtggggacacaaagccaaatcgtatcaggcatccaaaaacagcactccttagaagccagaggtactccagcctgggcaacagggtgagaccccgtctctacaaaaaactaaaatgcattagccaggtggcatggtgcgcacctgtagttccagctacttgggaggctgaggtgggaggatcccttgagccccagagttcgaggctgcagtgagctgtgatcatgcctctgctctccatcctaggcaacagactgagatcctgtctctaaaagaggaagaagaaagccagagatacaagcctttcaatgacccattagcccacctgtaggatccgctatatgcctccagatcccagcagaggactgagaggtggataatctcccggtatttgtgtgtgccacttttgtgtgagcaaagacccaaggttgcaacaacagtaggtgtgtacacaaaaaaggaccaggtccatactggtgcatactctccttatggcattaaaaagggacatgctgaatcctggacagaaaggaagaggccccccagaactgcctccagtagggccagcctgtgttgggggccagcccagcatctctgcgtcccatggcatgccccacagggggaccacctttgtgcctccctgttgccagtaaagcacactgatctttaaccttttcagcaactgcaagacatctctgggacctccacacagctcctgtcaaaatgtcgggctgctaactataaactttattttgatgtcttgcttttcgggaataattaccttgtacctaaaatgttagcctatttactgcttgtgcaaaaagatgacaataaaatcaatgttgcacaattccccaaagtgcatcaaagtcttttgcaatgttaatggactggcaggtctgagaggtgtgagctcatgttggcctgcttgggcccccagctctagcaggagaacagctctctcctcatcaacctgcaagcccttgtctgccaaatgtattcattctagagagttggctcagtccctggggtgagagaatgggtgaaatgggggaggggtgatgagagcagattggcaagtacatgaagtcacaaactgtgtgagctgaaagacgcttgcagggactgacatatccaattccacctcccagaggcagggaagcagtttcagagagcgggagtggatcccctagggccccacagcagataaattgtgatgccagaataagaatctatatctccatttttattagtatttttttagatggcgtctcactctgttgcccaggctagagtgcagtggcctgatctcagctcactgcaacctccacctcccagattcaagtgattctcctgcctcagcctcccaaagtgctgggattataggcatgagccgctgcgcctggccagaatccatatcttctaattcctggtctaaaattatatcatccactctgctctttgggggactgaatgatttttcctccctctggcattccctcctagaacatagaccaagtgatgtcttcaggcaggagggcagctaaacagtgtctactggtcatgtagctaatacaggcaccatgtcctaagaagtttggagaaggcatcataaaaaaataaaaattcagttccatgaagtcatagtgtatgccggtaaattaaaggttctgagaagtcttacaatttgcagcgtgtttcgttttgtttacccagcatttctaaagtgtcttcaaataagttattttggtggggagaggtgcgtaatatcggttggagaatttaatgtggcaaaggcagccttaaatatattcaccagcatcacactggtttttttgatggctgtggagaggcaggccctacaggaacaggtgtgggaaagtctccgtgtagcatagccaggtgaggacaagaaacaaaaagaggattggtgaaaacagactccactatgccatcatctacagcccagggcagccagatgtgtcttcttgtcttgggccattttgcgttgctataaagaaatacctgagggtgggtaatacataaagaaaacgggcttatttggctcacaattctgcaggctgtacaagcatggcacgagcatctgctcagcttctggcgaggaatcttccagtcacggtggaaagaaggcagagggggagaggtgtgtcacacggtgacaaagaaagcaagagagccagactcttttaaacaactagctcgtgtgtgaactaacagaacaagaactcactcattaccatggaaagggcaccaagtcattcatgaggaatccaccccccatgactaaaacacctcccaccaggctccacctccaacattggaggtcacatttcaacatgagattccaaggagacaaacaaccagactttatcacttcttctcctggcatgtgttgggggcatgggtgggctggatagaagccgagtacaggaacacagaggttggaaatttgcaaaaaaaatagctgtagcagagcaccaaccccccgcccccagtctgtccagtctaagatcacatttgactgaacaaggtatcggggaagggaacagtggaaggcagaagatgggacccaaaagtcatttgggagggagcagtgcagtggggctccacccaggcagagctgatcctcaggcagctctgggtatctttgtgaagacgcagaggcccaaggcccaagacgcagaggccctggtgtgactgcagtggtcactggggctacatccattgggccttctgcagcaggcccggtgcaaacggaatgtgctctctctggggactgacttcatgcaatgaggccgatcccttgagaaaatggacaaaccctgtgttgggcagaagtggcatgcctttggcttggttttcatcttccattgcagccttttgtggccgcatcaagagaacaagctggcgaaacaccctctttactggccattttcctttaaccacattcctggacatttttaccctagaagtctgcccacctctttgctgctggctcaccttggtttggggattttcttgcagcctttcccataagctcagcgggccactctctgcagaaatgtaactctgcatctaagacgtaactgttaaaccctaccttttggtttctgtccccaaaaccaatgtattttaatgcagatgccctgcagctcaagggtttttaacaatttttggagggaaaaatgtcacacagcttttgaaaatctgccatgagacctactccctgaattctccattcgtttactcagaaaaactcaattgaatcagggaggcatgattccccattagaggaatcattttttctttcctctggtgggttagatttgtttaggtgttcactgatccctcacttgattaatcaccccagctgccttctccttgctcaccaggtggggcggtgaaacaccagagtggcatgagggtcctgtagtcctgttgccatgtggggacccactgcatctctgggacaaaattccaccatttttcatttgaatttcttcaaagctcccaggtatgagccaattccagcttatttccaaattattgtagacttatctgtgaatatacttcacccccatttcctgcaatctacatgctcagccacacttgaacaaatccctccagtctgccttcctgaaacaggattggatgagggaggctctgggaaaaagcaaagagagagaccacaaaaaccaacaggaagaagaggtggaagaatcaaggaaggtggtgacagtttaatccaagatggtagaaatgggagatgagacggagaagtagaagagagaaggaaaaggcatagtcagagagaaagagaagttttcctgttcctgctcctacagcaggtcccggacccaggcatccatcaccaggcacatgatggaggaactctgtccccttacctatgaccagcagcgatgttttttcagtgattccgcaagagtcaaaaacccaacaaagcgcatcgccggcgctgtaaagggagcatgctgccggtgtctgtgaccactgtatgcaaagcttggcattagtcacagccgggccggctgtgacaggcctgaagtgagggagattaatgcgaggctgggacactttattattgtcattctgttctttcagactctgcctctgactttcaattttgctccagaattaattgtctgctccctgcagtatgactgatggagaaggatatgcggagcccaggcacctggctctggccttgacagtctcaggcccggtgtgggatggattgtgtgcggtcagggcgggggacagacgggcatccctcaaagaaatcggcccaggccacaactgacttcaatcagatgtgaccagagattatcctttgccaagaatcattttggcttgtagggttcccagcaacctgcccattccctgtcatggaccctccctggaacccagagctcagtctgttggtggagccattcctagtctttcaggtttctgattctcttcctttttttctggttctgggcaataaattagcagtgcagtctcctaggtctcagccctcccagatgtaagcatttttgtgagcatgtcaagcacagaatctctgacaatgggaaacgcagtgggattccaaaacgctggtgccattttccagttggcgttgaatacccacctccctcttcctcattactcacccttgccccattttccttcatttcaaaaaaaaaaaaaaatcaaatcatatatttaaacagaaaagtcttccttaatagcaaatcctgaaggaagcctccaacaaaatagcaatgttctctccgctttaggagtttggcacacaagaaatggttgttgactgaataaatgaatgtgtgaaggcatgcaagaatattttcatggataaatgaataagtggagttcctaaaaagaatgaaacatagaaaggcatatcttccttttacaaataaataaaaatcctttccagtcatttttaagccaaattcagctgctaaccatttttctaaactttggtcagcctcattccccattgcagatatgttcatgaaaacctaggtgtaattctttaaaaaaaaataaatggaatcccactttaaatgtttaagaatgcaggggaggagggaaaatgtctttgagaaatacatttccagtgctaatttttatgctctggtctagctgtgtgtgtgattttcaacttggggtctagaggtgacagtttcaatgcatgagatacagatttccctagccctcccaaaacaaagtttcactagaggaagagcttatgttttccaggcacctctccctccaaactggataagattgacacgtgagatgaggaaaaaccaaccaataatagaaagggcaagtgttgatgagctgagaaccatttaaaggctggttttctgtagaactttcaagagttccttctaaatatgctgtctgcctataacctgcaataaattactacagctttaactcatctggtactttcatacgattacggtattatgttaaagggtacagaaatatataatatgctcaactgtctctatagttgataccagagggaaaattaccaccactcagtgaagaagattcaacctcattacattaatgatttatcacaatgggaaaatgtgaaaagtaactagttgcttttatgaaaagaggcagcttttcccactggcaactcctgcaggctctccaagaaggagaatttagaaggagctccagacggtcacactctcccactcccttccaaagctccctctgcaacatgaaggagaaggtgcactggcaaatgttggaatatccttcaaacttgacattaagtattcaaatgttacttaagcaaagtgtgagcaattaaattaatcaatcttcccagccatgtacagaacagatgttcaataaatcctctttgcttacagtgagggggggaagagtccacttttaactgtccttcagcagtgacactgctcaggcgtcctctgccggcctcctgggctaccgtcaggtgcttctgctgcactttcctttattataaataacaacaggccacctggactacctgtgctacctgggagcctcaagtttaatgatccttccaacacagggctctgctcgcgcctgatcccaggtaatggggctgatggaaatggcagtagagtgacggttggcagtgacagatgactgctggccaacttgtgctgctgacaagcggtgaatatgggccaatgttgcagaaaggtcaggataaaagtatttgctcgactttcaaagtttctccagaaaaaaaataagcagatgagccaaaaccacatagacctccaacaagagtgcaaagagctttgcaccagaggggctggcttgttctgggctctagaaaagaaggcagtctccattggaagctgtgggttagatgaggagagaaactcagacactagggagagggagccttgttttctttgcatgaacagttcccagtgaggaacttcacctctgggctgccagggaacattgagggaacgttcagtaaacaattctctccctaacccctcaagatgatcatatagagtctccctgttacatcacccagaccctctaagtatccctctttgccaatactctgctgcagaggcagctaacctccaatttacaaaataataaaatcaatgaatgtgccagattaccaaagatcacaggatttgacctgtccactgtggcttctctaactaaatctaccatcctaaaggagaggactggggaatcccaaagcatggggaaggcactcagccctaatcccacagtgccaaccatcccctggtccacccccagaccaggaccctgcccagccagaagcctctgatcaccacccactgaaacccacaaggccactgtcattcagaagtggaggatacaattcctgccctacagatacataacttcaaccttttgaaggctgcctttccatatatggactttatccacattttaatgaggctttaaaatctccaagattaagctggtattttatgtagaactgcctgctttttatgatatcctgacatgttgtacaacatttggtgactatattgatccttataaattcagcatctatatatattcatgaaaagtaccttttctccccattcgggccacaagatgatccagacacacattttcctgagtggagacaataaaactgcaattgtcatggttttgagcgaacacgatgtttcagtgttttcaaattaaaccccttttaccatctgcttgcaaactcttcagtgaggaaatgacagctcctttctaggtatctgatggtgtaagtgcccctgaagtttctccttcaggtgagcttgttataaatcctgaggggcccggcaagggtttcctcccgtgtgggacattatatatcttcatgccctcatgtttgcccgaccagaggccaaccttctcccatttctttgggccattttatgcttttaatctgaaacaaatgattgcaggggggagaaagagcattatcaccttggcgaaacatcgggaatataaaaaagaaaaagaagaagaagaggaagaaagaaagagactatgggcaaattcatcttctgccgctacaatcaatctctcacctaaagaaatacacaataactaggcaggaaagaggcaagatttatgacttagaaacatctacactgaccagcatatacctagtcttcttggctctctccctacccgaatggctctctttaacagttacaatgataaactgtctctccctactgttttacaagtacattagctttatttaatgagatctcagagtaatttaacagatgtatataggacataagactagggaaactcttgctactaggatacttttgccaaggtattctaggacagctaatctgagagatagctttatattctttgagaaagcattgtttggaaggcttttaaaaatgattttaatggaaatattatattacaatcaatgaggagagagcctctttcacattcacttgcattcggcccatgaaaacgcaggatgaatgggctttgtgaagtcgtaggaactcacttacatattgaactgtcaggaaggatgtcaccatcagaaattaatacttgtgttaaaaaagttaatatttcacccacccaccttccaaaaagagtaagaagatacctgggtgtgaggaaacggagagagggtaggcaaagggagagaggaagagactatttgagaaggaggtgaggcacctgtttcagccaatgtcgtgtttcggggctggggtcgagggttggagacaggtgcagtttcctccctaccctctatccctctgtgcctggcgtgctcaggccaggacctccccttcctggctggctgccttcttccttccctgacattccttaacacttggttctctgagaactgtaatggagaaatgacaatggtattaacttttcaaaaattgctttaataaactgccaattaataagtgagaagaggaagccatgggaaattacctggtcatgcttaaaataaaattaaagggggaaggggacgtttttcctcttcctttctcagaaagcacaaggcttgggctctcataccccaggatgtgatttccagaaccaaattctcctaagtatgacaaaatctacactgcatggcaccacatcttggtctatgatacagttaactcagcttcaaaatggagtgtcatcccaagtttagtaaatattggcaatacaatacatttaaaaaccaaaatggaacaaaataacagcaactcaaaatttcacccaatggggataccagttttaattattagtgactctttttttttttttttttttgagacggagtcttgctgtgtcaccgaggctggagtgcagtggcacgatttggctcactgcaacctccacctccctggttcaggcaattcccctgcctcagcctcccaagtagctgggagtacaggtgtccaccaccatgcctggctaacttttgtatttttagtagagatgggatttcaccatgttggacaggctggtctgaaactcctaacctcagatggtccacctgcatcggcctcccaaagtgctgggattacaggcatgagccaacacgcccggccaacttttttttttttttttttttaacaaaaatggtcttttaaactacaggttgcttttggtcgaaaaatatttttgttttttaaatcctttaaatggtttgtaacagactgcagttgatatttacaattctgcaaaagtgtggcagatccttctccttaggattgctagctccctcataggcacctttatatggagtcacctctgaaagtatagatgttacagtgtgtatgtgacagcaggtggaagtgagtgcaagagctacatgtgtgtcttctcaaggtaaacatacttaacaacatcctaccaaacatataccactttatacagtgttcatggctccttatgaataatttagggtatccaatgcagtctttttaaaatacaacattcacagtgagcataaaaactcagtccaatgaaaggttatgaaattagtggtgactgtacaaaattgcaaagagaaatcacaatgaacctactcacttaggaggtgaggggctcagaaaaaaaaaagcggggggtaagagagagagagaaagagaggcagagaggtatgtggtgttcttgcaccaacggggcaagaacaaatctattgcatagaatttcatttattgagagctatacatcaagttgtatttgtttaatgaggttggcaccagaaagatgtatagaacatgtcagacacccagtaccaatgcgtagtggggaaaagataacatctcagactgcgaccactcgcttcgtcttccagccagtgtctctatctgtcggctctttggggaataataaatgagggggcagaaggaacaagaagccaaataatgaaaaacacacacaaaaaggaaaaattataacatgggagagcaaagtagagccagatttactgacctcacaactacataatcaagaaaaagttatcactgaagaaacttttactaagcggagtgatcttaaataacagggagtcctgtgaaatttacagcgctcttaagatatgcaaattgaatgcaaggtatagacataagggtaattaattgtaaatctaagaataatgtttctttgtcaggctgtctccctgttgtggaatacattctaatgtgccttagcttggaatacttttttcaaggctgctctaattacaagatgttcagaatttcaaaatactagttattcttatcgtttaatttagcagctgtaacatttaataacagaatttactgattgcatgacaatattgtaatctttcaaggttaaagcgcttgttcccaagtccagcccatcaggatccatgtgcagagagaatgttatggataaagcactttccacaggtcctcaatgagtgttgcgggtggaagcgtcgcaggccagctgagcccaaaaatggggcttagcccacagggttctcggcttcatccagaaaagaattcaagggcaagccagtggtagggtagaagaaaacagctttactgaagtggcagtgttgcagctccgtgactgaccctgcagagcagggctaccctattggcagtgtgctgagaccagcagctcagggcagttttgcagtcatatttatacccacttttaattacatgcagagtaaggggctgtttatgtagaaatttctagggaaagggtagtaacttttggttcatcaggtcattactatggaaaggggtggtaactcccggctgttgtcatggcaacggtaaactgacatggcgcaccggccagcgtgtctgatggaaagttgcttccacccaggacctgttttagccagtcctcagtttggtcatgtgcctgagccccgcctccagagtcaagtcccgcctcctgcctctgagagatcccagtggttgctcactgctgcttagttgcctcacttcatccactggcacgtgcttctgggtcttacagtgatttccttatcatgctgggaacaatgtactgatttgtgctcttagtgtttagctctcttctacctgcccgtgaaaacctcccacttcttgttaatgaaagtgatggtgggattctgcagatgacggattcttagaaaattataagcaagaagacagggatagaagttttcaaatcaagggaacgtgactcttgactgtcatcaagaaagcttggttgtcgtcaagaaagctcttagtgaagaaccacttgaggaaagagctgggcaagaaggggtgtgaggggattccaccaagcaaataaggagtgacggtcctgctcaggaaggagaccactgaagggatgggatgccgattccatcttcaatcgtttctcagaaaacatttggccaagagtggactacacaactagaaggtctgggagtggagaagtgggcacgagattggcccaaggaaagtgctaggaaagatgggttaaactctctcttgggttaaagccgcaagggcagggggcccaggcaagtgctctctcgccctgaatgcttgggctgtgtgcatgcctggctgctatgacaacgcccactcttgccctcctcctgctccactggcttctcctctctgcctcctccacttgctcctggtctattcaatttccttaagacaaacctctgatgctcccctgagctctgtctggggccctttcctcctttcccctccacactcatcctgcaatcccatccagtcccaaagcactaaatgccatctctgtgggttgactgccctgaaatctccagcccagaccttccaggggcttatagcttcaatgacatctacttttgaatatctggtggacatttccaaactgctgcatttcaaatggagctgcttctgccgggaatgttctgctcctactgagagaatcctcaggctttgggtcacagctcaggggtcagtgtcctcggctcactcatcttacgcagggtgcctccctcatttctctgtcatatcgcccttacttatttccatcagagaaacttacacaatttatattgatttcaattgcatgtttattttatgctgcctgtgtgatctactaaaatcgaaactgaggtgggatggggaggacagggggcctcttggctgtgtccactgctctgatatctctgtcctgctgtcaatggcaggtgctcgatagatcaccagtgagtgaagtgctctggttaccaactcagaaagacagcgtggtctgtgcctcttcctaggactccacaatagccccatagtgaaagtccactgcatgcagagagatactgcagatagacagcatatctaggcatcctgtgcccatccctgggcatctcagttgagaaactgaagctggatcagaacagggctgtgagaacagcaaagagtttggaaagtaagccagtcaaggcttggtgttaggagacccagaacattgagcctagagggaaaggatgatttaacattttatggcacttatttactagatagtctggagggagagggatttaaattgctcagtacagctgcagagagcacacttagggcccaggatgtggatctgaggaagcagtgtagattggaagtcagacttgggcccagagcaaaacagccgtggactcagtctaggctctaccacttgctaccttgtggaattctgaacaacttactccattttgctatgcctgagctcatttccctgttgagaggatttagtgaaacatttgcaaagcacttagccttcaaatgctaaagagaggtttaggaaaacaaacatcccccaagctttgtatttgtagaaaacagtgaggttccattcagactaattgtggaatactgttaatcccttaccagctcgggcaataactctagtcttcagcaaggttgtagcattctcttccccaccctctcaaatatatctgggatttgtcaaagggctgtcttcactgtcctcataagccatcagcctgccaccactggccttggtcactttcagaaaacttggctccaggccccgattccaatgtaaccatcccagaaatttatcccagttactgaacattcatgctttaagaacagctcttgcaaggaagaaatctgagtttccctcttcctgccacaaaaataaacaaagaaaagtaaaagtcaaaccaaagcctgggagaagatatgcatgctgcatatatctgacaaaagacttagttctgtaatatgtaaagagttcctacaaatcaataattttaaaagccaatcacctcaaggtataaaatgggcagaagacttgaatggacacttcacacccaaaaaaagatatgagtaggccaggcatggtggctcacccctataatcccagcactttgggaggctgaggcaggcagatcacctgaggtcaggagttcaagaccagcctgaccaacatggataaaccccgtatctactaaaaaaatacaaaattagccaggcatggttgtgcatgcctgtaatcccagctactcaggaggctgaggcaggagaatcgcttgaactagggaggcagatgttgcagtgagcagagatcacaccatcccactccagccagggcaacaagagtgaaactctgtttcaaaaaaaaaaaaaaaaaaaagatacaagtagacattttgcacatgaagagacgttcaacatcattggtcatcagtgagatgcaaactaaaaccataatgagatgttatttcatatccagtatagtggctaaaattgaaaagtctgagagtcccaaaagtagacaaggatgtggaacaaccagaactcttgtatattgctggtggaatgtaatatggaacaaacactttggaaaactgctataaagttaaacaaacacttgccatttgacccacacaattccagtcaaagcttttttcaaagaagacaaagatgacatgatgacaatgaagaagaagcagaagaggaagaagaagaaggaggaggaggaggagacaacaatgatgacgatgaagaagaagcagaagaaggagcagaagaggaagaagaagggggaggaggaggagaaggaggagaaggaggaggagaaggaggagaaggaggaggagaaggaggagaagaagacaacgatgatgacaatgaagaagcagcagaagaggaagaagaagaaggaggaggaggaggagacaacaatgatgacgatgaagaagaagcagaagaaggagcagaagaggaagaaggagggggaggaggaggagaaggaggagaaggaggaggagaaggaggagaagaagacaacgatgataacaatgaagaagcagcagaagaagaagcagaagcagcagcagaagaagaacaagagaaagaagaagaagaacaaccacaacaacaaggaagaggaggaggaggaggaaatgaaatgaaaacttatttacaaaaagacttatacaaaaatattcatagccacattattcctatagccaaaaactgaaaacagtcaaatgtcccccaactgaggagtggataaacaagttgttttatgttgacaatatgagatactatttagaagcaaaaatgaaaagaacaaaaccctaatatatgagggaataagagaatctcaaaaatgtcacattgagccagacacaaaaaagtgtgcactgtatgactcctttctacggagtgctgtaccaggcaaaggccagctgtgaggacagaaatcagatcggtggctgcctctgcaaggagtatagagatggacttaggagacggaaggaattctctagagggacagaaatggtttatatctagaagggagggtgtctacgtatgtcaaaactcatcaaattgcaccctctgttgcatatacatttattttaataaagtagattataaaaggaaagagaaaagacaacaaaatatgtgtctactttaattatgctcagttggagagagcatgtcctattgcaggctgggccctaagtgttaagagctcaatgaagcatctctttaagaccaatcatattggctcttctctcccctgagtataccccaggccaccaagtaatcaggtctacttcagttctgttacactagccccaagaaaatcagttaatgcaaacagagaacagagacaggaggaccctgcaaagacctcccaaggggcaaccacgtgggttgactgtaagaggatcccctcaatcttggtggtgatttctccatttcatttgacctgggtggagctggggtagtacctgttaccccatcacttaatctagggagctgggatatctcagtgcatccctaaaatgtatgttcataatgaaggaagggttttattctctaccccaggagatgccttagagaaacaagaagcgctacaccaccactctagcgtctggagccctgtctgggaggttaggcagacatggggcaaatcctggctccacctcctcataagctgtgtgactttgagtgtgttcctgaatctctctgtgcctcagttaactcctctccgtaatgggtatagtcaaagagtgtatccgtctcaaggttgtcattagaagtaaataaactagtagaggtaaagggcttagcactttattaactctaagcattgggaacacttcataaaagttagctatgattattattacatgaacatgaggataaaagaaagtctgagattcagaggtaaatggatggaaggggaaaataagagattcagagaaagagaaggaatcaaagaaaaagactaaggtgagaatgaaataaaggcatacgagaaaaaggtagaaacagaagaagaatgaacccaaattatacttctctgcctaaagcttgccgaagcgttctgcacagctccctgagcataatctgggctcggttatttaaaaggctgtgggataatacagtgggaagacaggtctgcacggtaactcacacaatttatcacacagggaagagccactaatctttttaggaaacaaggtattcatagttatttaaggctaatatttatgcatgaccacacattgtgaacacagcccaatctccatcctcacccagccaagatctgggaaggtctttagcagcaatgttccatattttaagccccctacagaagtctcacccagtagtctgcaccggctctgttattaactgcatccatacaccagatatattcatgcacaccgctaattgaaagagcagattttcccgaggtgggtgagtactaagccgaggtgggtggatacagccttgcgtgaatttcttatgaccaaaaccacagtgttaccttgcaaaaggtaatcaattattcaaactcagaaccttcagaatatgcataaatatagtccaggcacagtccagctggtctatttcattagcctactctttacagggtgctgagaacaaaaggctggatgtaacaatacgagtgaccccagcaacaactagaaagatgcccgtttcctgcccaacccacagaggacccgatcttatctgcatttggccagaatatgaccttcagggacgttttctccagtcatggctgaggctgccttcttgtcccacagagggcccctttccttgtctctctcgttcttctcttttctactcctccctgccaagggacccagcttcatcctgcctccgtctagctgggtcatgccattgtctcctgatgtttcaccagcatatgctgggtcgtcatgcccttgccattttaatctgggttacttgtcttccttaaccctgggtgctcaagatggaatctctactggatcaataaacttcattctggtccatgttcaacccttcttactgactactctcaatgcagtattatcctcaaagacctcttctccaaccaggaggagaatgaggcagccaagaggaagaggggagcctgagtcatggctaaacaaagaggcttacaaacaaacaaaaattccagagaactatgacctgctgcatctatccaagaccaggatttttgaagcacaggaagaggtacggtgtgcactgcactgttgtcttgggaaacagttacttctttatgtctcaggatgttaggacgaggtgagcagccaatcccttctagatggaattacagaccctccacctttcttcatccttcctggttctccttcacatgcccatgaggacccacccactggttttccaaccatctgttgtttggtttttgtctggaagcacctggacattaaagtcctcccccgagtcaccctcgcggcatctgccatgtgcaaaggagcttgcaagggacctgccagtgaatttgggcaggaggcactggggaggggtctgcagtgattcagtgatattgtgaatcagtgatattgtgaatgcaaacctggctgggtatcagaatcacctgtggagttcaaaacaaaatgaaaccagaccacaaggatgcaactcaaacgttcagaattggtggcatctgtggcaggtcgagttctctgggaaagagggcaactctgaggtggggttaagggtgcaggaggtgtattaaggtccaccctggacatcagcacctgaggaggggacacaagcaggagtgaacaacaggaaaaatcaacatgcaatgcaagcctaacaatggccttggctccttgcaaaactcaggagctagaatggcccttcagagttctcccaagctgtccaggccttcatggttctggattgatctgtcattgaatgtgacccaccctggtgagccacccatcggcagctgaggcaatccctgaagggaatagtaactgcaggctgcctgcctgcctgcctgctgggaatgaggcgctatgtctccattgaaggtgaatctgggcagcacccaccacaacccatcctttgccaagatggtaactctttcccttgcctgcgggttctttgcacaaggagttcaagtgttcaggtggcaattactgtttattctggctctgtctgttggcaaaggtgcttcctctttgggacccaggacctataaacctgaagaacacagagttgtgggtacaggaagcacaaactccccaagtgagttaatgggtgtgacagcaaggaagacaatcctgcttccatcccttggttcctaggtgtgtggatattttccaacttttgggtaaatataattttatatgtatatatatatatgttagtaaagcatcaaataaatatcttaaagtgttttttgcatcctggagaatgattgctgccccatccttacaaatgatcacatctaagctggtaccttagttgtgcttcgtacagaccttttcaacactttattaggcaattttttttctttctaatttttattttaggttcaaggggtacatgtgcaggtttgttacatgggtaaattgcttgtcaaaggagtttggtgtacagataattttgtcacccaagtaatcagcataatgtctctattggtctattttcatactgctataaagaatgtctgagactgggtaatttataaagaaaagagatttaattaactcacagttccaaatggctgggaaggcctcaggaaacataatcatggtggaaggtgaaggggaagcaagcacgtcttacatggcagcaggagggggcggactgccaaacacttttaaaccattagctctcatgagaactccctcattatcatgaggacagcatggggaaaatgactgccataatccaatcacccccaaccaggtccctccctacacacatgagcattacaattagagatgagatttgggtgggaacacaaagacaaaccatatcaatatccaatagttttcagtccttgccctcctccaaccctccaccctccagtaggccccagtgtctgttgttcccatgcttatgtccattggtgctcaatgtttagctcccacttatgaggacatgcattgggtgtttggtttcctgttcttctgttaatttgcttaggataatggcctccagctccaaccatgtttctgcaaaggacatgattttgttctttttatggctatgtagtatttcatggagtatatgtaccacattttctttatccaatccaccactgatgggcacctaggttgattccatgtcgttgctattgtgaatagtgctgcaataaacatgtgtgtgcatgttagactagcaactttggatggtacgtatatgacatgacaaggtaatcttgacattgattccatgtcattgctattgcgaatagtgctgcaatgaacatgtgtgtgcatgttagactagcaactttggatggtacgtatatgacatgacaagttaatcttatggccatggacccaatcccataacttcctttgctttaaagtgggtctcctggaccaatgtgacactatatgggatcctatcccagtgtatcaagccctctgtaatcgcgcgaatggtggctgtcactgaagcttaatgggaaataaagtcccatacatgaaataagaaccccgctcccacaggaatgagtcactggtccttccagggtggaggaccccagtgtaatcaacttgccaacatgtatccaggtggtcctcttgagggatggtgccatatcagaaattcaacatgggtccttgttactggcattttggacaggcaatagcagcaacagctagattggccttggtaagccagagcctgtgctgttgggcccatgcaagtagccatccctgccaccatagctactttgctcatgtactttgctatcatgccatcattggggttgctgatgatacagggtggctagcatcagctgactaagtcagtttgtctacgtgatcatttagtgccactattacgctgaaagctctctgttggacattaatacacaatacacagatcttcatactttgtgcctgctccaaaatgcccagcctcatgactctgccttgaagctcccaggtgcaatctactctggctacttctaggccctgaccagacaacggagccattcaccattcagcctatggcatcatatggatattctaaccttgagcaacttctcttcccatacacagtggatgaccaggatggtctgagctttgccccttggaagaatgttccctcatcactgtctttcaaggcaatccttgagaggaaccatggtgcagccaccatctgttttcagcctgcaccctcatgcaagtctaacctttctgtgaaccaagctcaggccattttgtcttccatcagttggtcacaagggatcccctctacagcaggaggagctatctgaggaaaaggtgctgacataacagtggagggtgacatgtggatctggactacctgctcatgcaaattccctgtgccatccagtcctcctcatactggatcccaggtggaccctttctaccttctgatagtttgtttccaggcttgactagcattaggagttgctgagtctgacagatgagctcctgatgggcagctatggccacatgttcaccttgtgtcccatgatcgggtgtgtcatctctaccaaggcccataagacaatcagaagttgtttttcaaatggtgtataattttccctaagcagatgccatggccttgacccagaatcctagtgattctctcactggagcttgccataaactccacatggtgtgttttcaaagtgctgggatatacctctactaccaatgggtctgctgagttttatagcccaaatggcagggctgctcacacctgtagacagaacctgttatagagttctttcttgttctaggtcccattcaaatctggcagcctttcaagtcacctgggtcagcgcagtataggtatacattttgttgcttccagaatccagagaaacagagaacctaccagccattgtgcttccttgttttttgttgttgttattgttatgtgtttgttttgtgagacaaagtctcactctgtcgcctgggatggagtgcaatggcatgatcttggctcttggctcactgcaacctccacctccctagttcaagtgattgtcccgcctcagcctccggaatagctgggattagaggcatgtgccaccacgcccagctaattgtgattcctttttcacagcaggagatgcaatgtgcaatcatttcttctttagtttggaggcaatgttgtaatatttccttgaccactgaactcttaaaaatgtttactgatgcagcagactcctgaattttcataggctttgtctccctaactctggctcacatatgacttaccaaggcctccaacacgctacatatcttgcttatctggtcctattagcgtattcgctatggaacggatcattgtgattttctgttggatgtcaacatgggacagattactttggaccacattatgacagagggcaggaaagttaacagagccttggggaaatctatgaatgtatcctgttgtttgttccatgtaaatgtaaactatttctgatcatttctgataggtatggaagagaacacatttgctaaatcaatgctgcatatcatgaattgaggccatgttaatcaactccagcaaagacatcacagttgcatggcagctgcgatcagggttatgacgtggttgagtttgtggtgctcactgttatttttcaggatacatctggttttagcaggggctacactggtaaattaaatggatctctgacagaaaccaccacccctgcaacatctgttaggtttgtaagagtggggctaatgcttcccatctccttccccctgaaataatactgtttttattgtcttggcaggagcagggtgaggggcattttcagagtcttctcttggctcccctcactatgacagtttttactctacagtctaagggctcagcaaggaacttgcaccaactaccaagtgcctttattctgattttacatttggaggttaggaaaataaccaatttactgggcttaatgcattatcatggccttactatatgactgggggtacaatgggactaagtaataaatggagccctgttcaaaaccacccacccagtttctaggtcccattcaaatctgacaacctttcaaatcacctgataaatgcgtaatgctttaagccaagtaaattggttattttcccaaaccctgaatgtataatcaaaatagatgcactttggactaatatagaccaaagtaatcggtcctatgttgacatccagcaaaaaatcacaatgatctattccatagcaaatacgataataggacccgataagcaagacatatgtagcatgttggagaccttggtgagatatatgtggtctagagtttgggagataaaccctatgaagattcaggggtctactacatcagtaaaccttttaggagttcagccgtcaagggcatgtcaaaacattgcatttaaattaaaggagaaataatcgcattttgtatctcccaccatgaaaaaggaagcacaatgtctggtaggctttttggattctagaagaaaaaaaaaaaattgtatacctgggaattttgctatgacccaggtgacttgaaaggctgccagacttgaatgggacttagaacctgggtgggtggttttgaccaggactccatttattacctagttccattgtacctccagttgtatagtaaggccatgataatgctttaagtcttcaagtattaatgtcccctgacactgcttgaaatgtttgcctacttccctttttctggaatgtagttacccaagtatatggctaaagttctctttgaggaagaactggatgctcgtaacaatcaacacttgccatagtgctccagggtcctccagggtccttcctcttgagtatatatatggtgtggtatatatataaatggtgtgtgtgtatgtgtgtgtgtgtgtgtgtgtgtgtgtatatatatatggtgtgtgtatatatatatatatggtgtgtgtatatatatatatatggtgtgtatatatatatggtgtgtgtatatatatatggtgtgtgtgtgtgtgtatatatatatatatatatatatatatatatatatatatatatatatgaactagtatatttttgcatggggaacccttccactgaagggttaaaataaaaaatatttttatattgggttatggtccagtataaaaaatatactggaccatatattttttatgctggaccataacccttggactgaagggttccagttccaaaaaatagctcagatccaaaaaccgggcacagtatttggtcattttattgtggcaattcctcagcctccttaatcaatcattcttgatttctttagaaatcaagaaaaactgagtagtagtaattgagtaatacctgtgttggctgcctttaaggacaatcttgctctatcaaccatctccatatctctctgtaggacaggccaacctggctgccctgccaccatggctactcattaagataattgcatcttcttggcttctggtgtttaagcatcaccatctggactctattgttttgaggaatcctaacatccccattactctcagtgagccttattctgcagcgcctctcctaaagtctgccctggcctgctgaggcatgccaccaccaaactcctcagtgacactggtgcctttgccaccagggcattcctggtggctttgggaaattgggagccttctgggtcattccatgggacatcattctctggagggtttatctgtcttacatggtacatgctctcagcatgtccccctctctaaattgttaaatattttctattctcacttttgcaaaaatactcacattttaaccttagtgtgaactattctttttttttttctcctggggtctttctcaggcagacacatattttccatgcctgggagagtgctccagtattgaaaaaaaggtctcccttacccaaccttctcatttaatctggttctcttgacaacccctttccgaatgcaagccctgccattctcctctagcttatgtgggtacacactgcctagggtgggggtacattgtcccattctccctctatcaggccagcatattccccagctgagttacttatgcaagagctcaccaaaatgagtagcaaagcccagggaagaatccagttcacctgcattcctcgatcttcctggtatatcattgtgccctgcaaaaaaatatgccctaaccctatgcatttggcatgcctctgttggtctggaagacaacagtggtaatcatattcaccaaaaaatatagttaattcttcaacgttccatcttctacgtaaatataaaagtgctcctgggtatctctaaggacatagctgaactcatccaaaaggctttcaaaccttatttcagaatactgtttttaaagcattattctcctcccacctacatttcaaatcaaaccatgcttactttgacaaggatgctgtttttccttcaaagagccactccccaaaatgtacttagaaagaaggaaagaacatcactgttgagttgtaacaccagcttccctggagaggatcccagaaaaatgcacggattttcagcctttatgtaaaagcccaggacttcccaatcctcagtatgtgaaatatctcaaacaattagtttgtgaaagtgctgtcatgtgtaagcgaacaaaagccctagacataagaatgtgctcatccttctttcacccctggagcctttgttgagcatgtagtatgcacagaccccacatcagggactgtgggaaaacaggagtgatgcagccctgtgatccagcaggaaaagagggggttgttgggtcacattcctgaatctgaatccctgccaagactctctgaattgcatctgacaatgtccaagccttggttaattcttctgtaaaatggagatgcttgcctcaaggggtccttgtaaggagccaattagatcataaatacaaaggtactttctaagtagtgaagcactttctgtaggttaacactggctactgaaagaaaacccaggttgtgcttccaaataaatgcctatctagaagagaaagtaagacattgaacaattaaggaaaatgtactataaaaagtgagccaggataatggcttccagctccatccatgtccctgcaaagaacatgatctcgtttcctttttatggctgcatagtattccatggtgtatatgtaccacattttctttatccagtctatcactgatggacatttgggttgattccatgtctttgctattgtgaatagtgctgtgatgaacttacatgtgcatgtatctttaaaattgaatgatttatattcctttgagtatatactcagtaatgggattgctggaaacagaaaaccaaacactgcatgttctcatctataagcgggagctgaacaatgagaacacatagacacagggagggaaacaacacacactggggcctgtcagggaaggggtggggcaggaggagggagagcatcaggataaatagctaatgcatgctgggcttaatacgtaggtgataagttgataggtgtagcaaaccaccatggtacacatttacctatgtaacaaacctgcacttcctgcacatgtatcccggaacttaaaattaaatcaaattaaaaaatgttttaaagtgaaacaggacccaaagagaacaaacagaagagctctaactttgcccagaacaaagggggaagatgttatgttaaaggggccctgcagcatgatcagtatttacatactgatcatgttacatacataacaggctgtgggatgtggggataggactcaaaagctgggtttggcaggtttaaggatgctatgaagtttggatgttaatttgtctttcccaaacttctgtcatttagacactatcccattatctttgccaaacccatgcatttcctatcatgttatcaacttaatagctccctttcaatttttacatgaacacacttgtgctcattgccatatcacagcagtaatatctgtcaatgtacatgtttaatgtgctaggtgaacacttttctaatacacatgaaaattaatttaaaaaaaatttttttgagatgagacctcgctctgtcactcaggctggagtgcagtgttacctcgactcactgcaacctccacctgccaggttcaagcaattctcctgtctcagcctcctgagtagctgggattacaggcatccgccaccacgcccagctaatttttgtatttttagtacagacagggtttcaccatattggccaggctggtctcgaactcctgacctcaagtgatccacccgcctcagcctcccaaagtgctgggattacaggcgtgagccatcgcgcctggccaaaaattaacttataactataaagtgttcctttgtatcccactgaaaatcctattgtgttcatccatggtaaatgggccccacagggcaaggggagccactgggaagggtttggagggaaagaatgatgtaattagcatgttctcttttctggtagcccatgtaaaaaataccagttaggaagttatttcgattgcacccaggtgtcttttcctgacctggggacagaggagtggggatgagaaggagaagtgaactctatagggacactcagggctggttccctagaagggaagtgtggggccaaggagataggaaggagtccagaattttgaaacccagatgcagaaagcccttgaagctcaggaacttccctcagttttcactgattaactgaaaagcggaagttaacataaattaaacctggagtaaacataaactctgggtcacttctttggaaaatgaaagtaaatgcataaagttatttacatctttatgtttaaaaactatctaagggaaattggcttctgaaacaccatgtgttttcactcatcaaagacctatttagggacatgaccacatccggaaagcatttgtaaagcattaagatattaccgaaaaatgggttaagaacaggacaaacaagttacaaaaggagagctacaacttgccaagaaaatatgaagaaatactaaggctcaccaaaaaaaaactcttgtcaaataaagcaacgtgttactattttcaacgatcaaatgagcaacttttatgactgtgttagttattagggccttcaccagctatttccagctctcccttaaggactcacaaaggactccgcctcctggctctgtctgggtggatggggccacgtgattcgttttagacaatgaagtctgagcggaagtgacatttgtcacttctgggctagatggcttagttgccagttggagatgccccagagctttctttcctcctgcaacagtgaccaagcaacattccagatggtggctgctcaagcaggggtcccaaggtgatggacgcctggagcaaagcccagctgatgcaggatggacatggagtttgagtggagggtgaacttgggatgtcacaagccactaaaaatgggggtcgttaataaccctaccaacggattcaatggcaggggtcaatgctggcaaggggaaaatacaacaggaatggaatgcacattcctctaactcatgttaaaaatggttaccccctttgacccaaaaattccacttatggggatcaatccaaaaatgtaaaaatgcaaacaaaatatggaaaaagctttatggtgaagggatagactaatgaccaaaagcatggcctttaaggctgggcacggtggctcatgcctgtaatcccaggactttgggaggccgaggtgggcagatcacctgaggtcgggagttcaagaccagcctggccaatgtggcaaaaccctgtctctaccaaaaatacaaaaattagccaggcatgatggcaggtgcctgtgatcccagctactcgggaggctgaggtaggagaatcgcttgaacccgtgaggcggaggttgcagtgagctgagatcgcgccattgcactccagcctgggcgaccgagcaaggctccatctcaaaaacaaacaaacacgcaaacaaacaaaaaagcatggcctttgtcaaactgctatccatttgaattctggaattgccccttaccacctatgtaggtgattcgtagccttgggtgatttgtttaactgtctaaaccttagtttctttatctgtaagatgggggagatatttctttacctcatagtgttactgtaagaataaattagatgctgtatgtacaaaccttaatgaggctagctgtgtgactagtatcacacacacacacacacacacacacacacacacactaacacatctcaatgttactttcttagtccaacaagagaaaacttggatgcaacccagtaagccacaaaaaggactaataagggatagtaaacccacgagatggaaaatgtttatgtgataatactaattttaaaatcataagacaaaattgattacacaatataatcacaattatggaaaaataatgaatagaaacataatgagcagaaatatatcaagatcataatgagttgtgtttgaaacataaaattattgttttttttctacttctctgttttccaaatttcttaaagtgaggcacatgtgtggaccctgaaaggagacttctctagttttgaagcctaggcctcccacctctcagctgtgtgaccctgggcaacttacataagttctctggacagggttccccacttgcgaaatggaaatcacaatgttgtttcagtaatgaattagataatccctgtaaagttataagtataacgcctggaacagagtaagcagtcaataattattatctatttttgttgccattatcattgtatgttccttttgtaatgtgggaaagaacggtatttcacaatctatgataaagcttttaataacagaaggttgtctgtagcaaatacaatgctcttcacttgggaagttcacagtccaggaaagataacaaggcaaaagacaagcagttcagggctacagagaaaagcagaaagcactcacccccaggtcgggacaaaagagatggcctaaatgctgtcccaagaaaggcacttggcttggagcctccacatccccaaggtcagggccatcttgtcgggacgcatgcagaactctctcactgacagctgcccctgcagcagctggctcacccccatgatagatgagaattacagccattttcaagagaccaacagaaggtgggccgtgtcctgataagctataacaacagtagtaaagttctaaggagaccagagggtccccacaaccacacacttcctgcagctgtggctgctgtaattatggccgtgacagctgggcagccgggggacatgactggagtagactaaggcatgggcatatggcactgctggtgggcaaggccagcccacccctccctcaaccagtgcccaagttcagctgcatcctcgagcctgactgtcaggatgccatgaaataggtccccagcgcacccagtgggcaggtgcaagagaaggaagagctggagtgcatctttctggtgcccaggctttactggtgcccagggccagacacacagtgggcgctccacccttgccagcactgtctggaatggcagaaacacattccagagctcaatgctgctggcaatgtgtttgaactccccagccttccacgggaggcccatgctaacagaacaccctctagtcactcctccgaggacttgttggctggttcctcctctctgaaaaccacccggaatcatctgtcctcagacagaattaatcagtcacctctcctctcctatggctgagtcttcagtgcacatctatctaagaccatcccttgaatccataaccacatatctgtctcccctctaagcttcttccaaagagaggctgtgtccttctcattttatgttcaatcattaaagaacgattcatgattaatgaatcatttgttcaataaatagagcatgaaccatacaagatagacacgccatcctgggaccaagagtccaactaaataagaaattacaaagtaaaactttgggattataatagaccatgttaaggtgcattacatgtggcaatgagacctaatcaagtcttaagaaaccaaggaagtcttcctgcaggaagcctgaataggtgttaaagaagttcatgaaaattaattgtggagagggggtgatgatggaggaagacccagagagctgcaggagagacaagcctgggtgaactgtgggggcctttgcaggactgttaaaggccataggaagtcacattgatggctttaagccaggaaatggcatgatcgggtctgcaatttataaagagcagtctggttttctttggaggggaaaaaatggggcaaagtagcaataacaggctaggtgtgtcgcatcttagcacaaggcctggaacataatcactaccttctgtttgttggcctgaactaaaggaggtggaaacagaatggacaggtgcccaggtggcacatttcagggttttactcaccctattatccaacatgcatcaggtcaaccccacaggcccctgtcttgggagcctcaaccccaccctgaacagcctttgaagataatccatttccttcaaatatctccgtgtgcaccttccttgccctctaagatagcaacacctacctgcagacgtgaatgtgctgagctccacaccctccatccagaaggggatcaccgggatggcagggaaggagtgctgccaggaagttttccaactccagtttctaggtctgtatttaattccggatctatcagctaagcatttagggtgctgccactgaagctctgtgtttacacagctaaatgcctctgctcctattgacacaatgtcgatgaagagggatgcgtcaggctccgccaccaccaagcacgtcatgtgtcccagattgatgaagcttcctgacccactccagccccagcagctgcatggctcctgccactcagcccagcaagctgttctccatcatctccattaattaaggactgtcatagcagggaggtgagacagcaaatcctaaatacttgcctcaagtctcagcttccaaattcccaggagtcttaccctgaaaacagaaaagtcagatttaacagtggggtttttatctttccgtttacaaaattactaccagctcattatagcaaatgctaagaaatgcacaaacacaaacatacccagaagaaaataataatcactcatgatccccccattcagaggtaaatgctgatagcttttaaattcttacatatatttcttccatgcatatatacacatgtttaatcctgatattcagggactaagttcatgtcagtaaattgtttcctacaacattattgttaatcgctacgtagttttctgccttgtgactgtcctgtacttcaaccaatcttctattgcactcaatgtcgtgctattataatcaatacagtaatgaacatcctggaaataaatccttagagaagagttcattagacttcattagaataaatatatgatggaaaaataacctaccaaaagaaatttgcttttttaatactttggctgtgcattgtaaaatcaatcacactttagaaatgtatcaatttattcctccaccaacagaataacccctacaacacaactgcatatgcaactaacatagcaacagcaactgtatagtaatcctgatcactatcctgttacaaagagttaatgcttacctagaactctctatgctcctggtactgagcaaaatacattaaatatattgttccttttcatgttagctttttactttctagtgagggtgaacttttttcccttacattcattggccactgtgattctttgttataaaatttcctgcaattttcttggcctattttttagtgtgtttgtcatttaattattggtttgaaagcagtctgatttaataaggatgctatacacttgtgttgcaaaaatgctttcccccaggttgtggtttaacatttagttttgtttatgatcatgttgacataaagaattttgtcattttggagtagtcaaatgtgttggtctcttattttacagattacgcctttacatacactctgagtacttgcataccacaacatcagataaatattcatgtgttttccttaaaatctttctatggcttcaaattttatattaaatattttatcaatctgaaatttgttagtgtacgtggtgctgtaaagatctattttttttccacacggtcagcaaattgacctaatttgacttactgaattcctcatcttttccccactgatttgaaatgccacatttatcttatatgaaattcatatttacatgggcctgcttcagctctcctcgtactgttccattgatttatctgtctattcctgcaattaaaccagactatttaaatatatacgaagctacaaggacgtcactgcacattgcttacccagtagtgcaagttcctcctcacccttctactttttcaaaacattctcagcaattctaaagtgccagatgaatgtcagaatcattttataaagcaccacccctccaaagtcccactgatattttcatttggatcccattaaacgtctagatcatgtagagcgaatcggtaactttatgttattttaattttaattcaataacatggcatattttaaattcatattccttattttaatttcatcacatttctacatatttcttgtaaacttttccctagatattttattgttttgttgctaatgtaaatggcactttaaaaatcatcataccattggtgtaaagaaaaactaactttttacttatgtgattatgttgacaaaactttatctttaaacttgcttgatagtgtagtaatttttcagtttgttcccttgagttctccaggtagacaattctccttcatccaagtgtcagtaaccgtataatcaactactttcaaacagtaaatcctctattttgtagtcttggtttattcaattggtcagaatttttaaactgtgttaaatatggcatggatagtaagaattctgtcatatgtaaatagaaacgcctctagttttccattctaaaatataattaagctgttgacttgggggtgagagcctctttcttgataaagaaggttcaatttctatcatactaatattgttttagattttgtttcttgggaatgagtgttgaattttattataagccatttcagtaggagatgtgtttaaatcttctctcttgacatactaatatatttaaatatattattatacttataattagcattattatattataattagtattataattagtattataattagtattattatattatgattacaattagttttatattataattagtatattatcaaatataccaatatatttaaacatattggtacatttcctaatattaaattattcttgaattacttaatggaaaaaaactgaaccagaagatattgttcttttattccactgtcagatagttttcacgtattatttagcattttcacaatttcacatagtattcacattttcacatagtattttcacagtttccttttttgaactatcttcgtccagctttaatattagagtcaccacttcataaaatgaattaactagtgtttttgatgcaggtcaggtgagccccaaagtgagacttagcctgcgagggttcttggctttgcccagaaaagaattcaagggcaagccggtgctagggtagaagaaagcaactttactgaagcagcggtgttagagctccgtgactgcccctgcagagcagggcttccccacaggcagtatgctgagagcagcagctcaggacagttccgcagtcagatttctatctactcttaattacagatagagtaaggggcagttaatgaggaaatttctaggaaaagggtagtagcttttgggtaattggatcattgccacggaaagaggtagtaattcctggtgttgccatggcaatggtaaactgacatggtgcactagtgggagtgtcttatggaaagatgcttccacatttcctctgttttagctagtcctcaatttggtccagtgtccaagccccacctatggagctgagtctcacctcctaccttatttttaggggtatctatgctccgaaactatttgtataaaaaaatacatttcccataaaagcatctgtggtttcttttgttgttgtggaaagtaaacttttgataactttgaacagttctctcttagttacttatttgttcgagagtttcatagtcttgagtttccttaaaattttctaatatttattgtaaaaataatattaaaatgggatttgattatttactctcatttttcttataattttatgtttgaggggaattttatcctcatttcctggataaatatattagaaatttacttatattttaaagacacagaacttagatttatttgttgatcctatttatttttgttttgaaaataatttatttcattgtggttaatttaattttttttttttttagaaagagtctcactctgtcatccaggctgaagtgcagtggcacgatctccactcactgcaaactcctcctcccaggttcaagcaattctgcttcagcctcccaagctgggtataaaggcatgcaccaccatgtcaggctaatttttgtatttttagtagagatggggttttgccatgttggccagtctggtctcgaactcctgacctcaggtgatctgcccacctcggcctcccaaagtgctgggattacagatgtgagcaaccgcgcccagccagttaatttaaggacaaaggattcataacgtagcagtgttgacttgtggtctgtccttatcttcctcaatatatacatatatacaaaagcttttacatacataacatatagtattatatatatatatatgtttatgtacatatatatcatacatgtgaaaggtcttaaatttgaaatgcgttaaatattgtgtattaaatgtttaatacatattaaggcttacacattaaagcttttaactttttaattcctttccctttcttttgtactctttatttgcaatttccttcctggtatttatttacataattgcgtttatcacctaattcctttacatttacacttttagattgaataatggaagtagactatgaattttcctatgttcagctttgacagcatcctatgagttttgcttcttcgtgcctctttgtcagtattttccattgtttactatgattgtgatccacagtcacaaaaaaagttagaaagagaagttttaaaccatcaaaattatatcaccaacattttctattttaattatttgtttttctagataaacttatgaatgtatgttgttcataaattcagtgtagaaatacatagacaaaattagtagatcataaaataatgatcacataaataatgatttctatggcaaatgacaccatgaaccaagttttaaaaacaacaaattatgaaattttacaacctatgacaaagatatttcatttcaatcaataagaaaaaataactaaatctgcaaaaatatacacagaatataaacagaccactggtcaatatcactaaacctgtgcttttaaacacaaaataaaggaaacggaggactaacgatgattcaatgcaacttgttcatgcccttcctccatttttgaaattgcgttgtcaattttttgggggttttttttggaggcaaggtcttgctgtattgcccaggctggagtgcagtggcaccatcagggctcactgcagcctcaacctcccagactcaagcaatcctcctgcctcagcctcctgagtacaggagactacaggcacacaccaccacaccaggctaattgttttaaattttagtggagataaggtcttactatgttaaccagcttgccttgaactcctgagctcaagcggtcctcccacctcccaaagtgctgggatctcaggcatgagccactgcacccagtcatgttgtctttttacttattgattaaaaaaaactttatttgtgatattaatgctttattgtttattttgaaaagtctttttcatgatttgtcatttacattttaatattaagaacaatttgctatgtatttcttaaaaaattagtcaaatctgcgggtctcacctgtagcaaacacatactgagtgtttaatattaatacttatgtactaagcccacaagatttagctcagcataggtttcactcaattactgtagccaaagacactcaaactccagcagcttctcgaaaattctgtttgttcattaacgcacattgactctaatgtggagtcaagcaaataagtctttttaataagaatcatcacaattcatcagtcattatttacttagagtttcaaaatcaattttgcaatttctatcacatatattaagcacatgccatcaattttttaaaaattttttcttttcgtgtcatcaatttttatcttaaaacaatacatagtagtgtcataagaattacatgttcttctgaggacaggcctcttaaaaaaaaaactgcctatccctcttaaatgttatatttaaatccgaagaatgcaaggatatgattgttggatttattaagtgcagtacttgaaaaatatgaaatttccaatcacacttaaaatgaagtatgtgaataaataaaatgtgttaatttgtattaacatttttaggtctgcggaaatggcattgaatatgttacacctgctatagctaggacaccaagtttcttatacactcagctcatttacatctttccaaaacaatagctaacattgagcttaatggcaaaaaaatcaaaacatttgtaataaaatgagtaagaaaacataggtgtcatctttcactaccattatttaacatttcacaaaatgttaaaagcttctcctaattttttctgtaaaatagatatagatgtatctttccctaacttgattaacaaatattcctctctcaaattgacagcaccaggtgaggcactaaagaaattctttaaaatcggtaatataataagtatgtgctcaatctttgcattcaatttcatggatctcattgtgtatttaaggagaaagtaccacattagtttgattctagttgcttaataatatactttgttaaatatctcaatataatacatttacttccctccactcccatcctcattactctttattcagagcattagttctactcttccacttttacttttccagataaactttaagattattttatcaatttcaaaaagtcagtaaggagagaagagattgagaatggaagggattgcatcagggtgttttggtttgttttgttttgtttttgaggtggagtctcactctgtcgcccatgctggggtgcagtggcacaatctcggctcactgcaacctccacctcccaggttcaagcaattctcctgcctcagcccccagagctggaactacaggcatgcgccaccacgcccagctaatttttttatttttagtagagatggggtttcgccatgttgaccaggctggtcttgaactcctgacctcaggtgatccacccaccttggcctcccaaagttgcatcagggttttgactggcgttgcattcacgttggaagtaacttaggggagttgcagtcccttgcctccttgcctagcacaacatcctcattgttctccaggctcttcccctagttggtctttccttgtagtctctatcaatacatgatgttatttacaggaaagaggtcccgatccagaccccctggagaaggttcttggatctcacacaagaaagaattagggtgagtccatatagtaaagtgaaagcaagtttatcaagaaagtaaaggaataaagaatggctactccatacacagagtagccctgagggctgcttgttgcccatttttatggttatttcttgatgatatgctaaataaggagtgggttattcatgcttcccctttttagaccatatagggtaacctcctgacgttgccatggcatttgtaaactgtcatagtgctggtgggagtgtagcagtgaggaccaggtcactcttgtggccatcttggttttggtgggttttagccggtttccttactgcaacctgttttattagcgaagtctttatgacctgtatcttgtgccgacctcgtatctcatcctgtgacttagaatgccttaaccatctgggaatgtagtccagtaggtttcagcctcattttacccagctcctattcgagatggagttgctctggtccacatgcctctgacaattacattatacacttgttggtttttttctatgccacttgccatgtccgcagctgaaacacaaactccaggagagcaggactctctccaactcactcctgtatctccagtgccacagacgaagtctgtacccaccaatattttgcaatcaagggctgaggctcatagtttttcagttttcttaggcttttcagctacgtaatcatatcatcgacaaatagtgatgtatgcctcttgcttttcaatatatattcttacgtcactttcctatctaatgacattgcctcacaattccagaattctgttaaataaaagcaatgattaagcacatacttgtaatattgatttgaaaggatttctttttatgtcttttatatttttaaatttattttattttatttttatgagacagagtctcactctgtcacccaggctggagtgcagtggcacaatctcagctcactgcaacctctgccttctgggtcccagagattctcctgcctcagcctcccgcgtggctggggttacaggcatgcaccatcacaaccagctaatttttgtactttttagtagagacggggtttcaccatgttggccaggctggtctcaaactcttgacctcaggtgatcagccagccttggccacccaaagtgctgggagtacaggtgtgagccaccacacctggcctaaaggatttctttagtgtctcacctggtgctgtctgtcatttgagatacaaatctttgttaatcaagttagagaaagatacttctatatctattttactgtgaaaattcaggaaaagcttttaaaattttgttaaatgttaaataattatagtaatagaagacacctgtgtcttcttattcactttactgtaaatgttttgattttttgccattaagcctaatggtaggtattgtttttgaaagatttatttatgttctttgtgttatgagaattctcttgagagaattatcttgatttttcatagatgtgctttgaaagtttaaaagaaggagaatgcctacgcctacagctatatgagagtggctctttcgcaaacgtttaccatggtatttgtctatttagcttttctccttctttaatcaagattaatctgtatctttgcttataaaattatccattacatccacgtgttcaaagtttttacatcagaattttacaaatagtctattctgtctttcaattctctgtggttcttttactttcttttactattaaaaagcatactttttaatagtatgcttttatatttttaggttttatagtttatttattttaccatagtttaatctggctcttatttttattttatttatttatttggttcccagttcatcacatttcagcttttatcactacttgggtctaatgtgttgctttttagtcccccttttgagttgaattcttaattaagtaattcttaattctgaattacttaatttcatgtcttttttgttttgtttgactcttaaagggtaaagaatacgaatttttcctctcgatactgtactgagtacaagatactctataattgcagttttgttttaatcttcagcctaaaggtttagttttgttctgatttttgaacactagtgttattgttttaatggataaatggttagaataacaaaagggcattttctattgttatcagatactattcctaaattggtcaatgaatataacttgtagtgtatttagtttttgaatctactaacagtttgatggcctaatttgtattctgtgagaaggatgtggactcccctgtagaggtccatgcattggtgtggggccagtggctagacttctttggtcagcttggtgagtcaagggctaagagatgcactaggcaccatggttatagctgtagagtttgtcatttctcctttgtcctttatcaaagttagtattttgtaattttgttcataaccacccaagacagttgctcctttgttttgaattgttatttacaccactctgagatgctcttagacctgtttactttttacatgttaatgtaacaactgttatatagtgctagctatgccaggtgatatagtttggatgtgtccccacccaaatctcatctggaattgtagttcccataatccccacgtttcatgggagggacctggtgggaggtaattgaatcatgggggcagttaccctcatgctgttcttatgatagtgtgtgagttatcatgagatctgatggttttataaggggcttttcccccttttgctaggcacttctccttgctgctgccatgtgaagaacgacatgtttgcttcctcttcctccattattgtaagtttcctgaggcctttccaaccatactgatctctttcttttataaattacctggtcttgggtatgtgtttagtagcagcatgagaatggtctaatacaccaggcatcttataaatattaagtcatttaatccctgcaacaaccaatgagctaggtattattattctcattatacaggttaggaactaagatacagagacattcagttacaagctctaggcaccataaagagagggtcagaagtgttcttcatcccaagttccagattttctgttctttttaaaattatttgtattgagatagaattcacttataaaatgtgccactttaaatataatataattcagtgagttacagtatattcactgtgttgtgtagccatcactactaactaattccagaacatttccattacccataaaagaaatcttgtaccatcagcaaaatactgacctcacccccacatccctcaccccctatcaatcactcatttgctttctctctatatagatttgtctattctggacatttcatataaatggaatcacatgactgtggccttttgtgcctggcttctttcatctaccgtaatgctttcaggctcatccacattttagcaagtttcactactttactcctcgctatagctgagtaatattccattgtatggatataccacattttatttatccactcatcagctcacggatatttggattgtttccactttggggctaatatgaataatacctttatgaacattcatatacccatttttgggtgaacatatgttttcagttctcttggatatgcactttggagtaaaattgctgggtcatatggtaagactatgtttaactttttgaggaactgccaaactgttttccagagtggctgcactattttatatttccaccagcaatgtatgtggcagaatctgtgctgtcaagggctgtaatgtattactaatcagcatttaacttgaatttaactcgttcagatattattgtgtttacccccactttatttctgcttgtatttgtatgacatctccaaacttttaccttcagactgggtcattcatagttaaatatctctctttaatacaacacctgcaaaacttgtgggttttggacaagtataagattatttaactattaaatcaagatttgttgctacagcagatatatttactcttactttgctgtatttattttatgctttctctttttaatgttttcttcctctttatttttttctcttttgctctatatgaggtctgttttatttttttcccatctggtaatttggacgtagtacagttagattatatttctggtggtggctatgttttaactttatgtaaaatctttaaacatgtattatcaattatcagtttcagatatgaagcaagatgttttagtattttctacaaaagatgaagattctgcatactatcattatatctggcgccatcctcatcgcacactgttctctaaattgctatgctctgatatttctgaccctactaattttagctatattataattatttctatattgtgcagcttttctccctagaataagaatattttgatgctgtcttgtaatgttaattatcggtgctatttggctcggttctatgatcagtcctttcataaaacagcctcttcttttgtggatcttttggtttgctaaaataaaaaagcaaatgggtgatacatcctctgagtcctcgcatgttggagacttgttcctacagcttttactaaagacaaacaagtggactgaatatagtattctcagatcacatgtttttccatcacaaattttcttgacctattttctcagactttctgggatctgatgttgctgaggaaattctgaccaaaccaggattttaaattttctttgtgatttgtttttcagacctgggtgtttgttggcttcatccttgaattttaataattttcaccaggcattattgcatatattattcagaacacagtaagcccagtcatttttgtcaatttagtttttcctgcatttcaggatgatttttgttgtataactgcatgctattttggtttccacttgttgtatgctctaggtcggtcagcccacgtgttgctatggcgagcatgccccagtagccttccatatatgccttcctttctctcgtggttgttatttatttttcattttcctttgcatcttccaagattgtctaaagcctgttcatactcccagcccctgactcaggtttctgcagtattaattatcttctttgctacttctattttgtacattctgcactggtgttatttttccctcagtttctttcctcaaacctggcaaatgtcttttcttctcagtctgttctttgatcaagcttcctgtacacttgcagctgaccagcagaataatactggataaacatctcaaaatggaactaacatatataccctctgcttttttattcccttccccatgtcttacaattatggcatgttatgttggtttttccattggttaccttttaaagcttaagtaatgtactactacttttattcctgtttcatctgtgtttgatggtggcttctaatcccccactgtgtgaagtcaggacatctgtgtccttactcctccttgtacaccttcccccgacacattttgatcctccagtcaagtcttccacacatccttcttagggtgactctaaaacatgaaaaccatgaatcagtattatcacaatgaaactattcagtgcaggccaaaaaatgtaccagaattctaccttcttctcggaaactcaatgccatagaccctggagattcagagaagaatattcctagctcaaaaatgaagtggaatctaattttttgcatcaagtgtttaaaataacagagcaattttgttggcttcctattcaatatatgacattcttgcagtctttttgtttttgttgttttatttctgttttgtttttctcctggagtttataattgcattttttgggggggtgctttttgcttttgtcatatttatttttttaaaaacttttcagatactttttattctatcatattctgacattctccttccaaatccctctcctctatcccctacaataaaccacttgcctacttcaactgctgcatggctgtcatccagggacctcagaccagtgtctccctgtttcctagatagatatatatctttctcttcttgatttagttcctcatagtcctagagacatatccatacccctttttaaggaggggcttgcttaaacattacaacatcacgagaaagctacaagccaattttcctcaaaaacgtgataatgctttaacaaatacaatctagtaatatatacatatatatatacatatatatatacacacacatatatatttgtgtgtatacatatttgtatgcatgggaatatatacatattttgtatatatatatgtatgtgtgtatatatagatacactatatatatacacacacactatatatatatgtatgtatatatatatatataaaatgggatttatcctagaaattcaggattgcttaattgtcaaaaatccatgtatttcacagtgttaacaaattaaataagaaaaatcatgatctcaatagatgcacaaaacaacaaattctaacacctattcttggtaaaaaataaacaaaacaacaacaacaacaataaaaatctcttagcaaacaagaacagaagggagctttctcaacctctgaattgtgaaatacttaatggcaaaacactgaacatttttctgctaggataaattaaaaggcaagggcatcaaatatcaccacatgtatgataaacactggtctagacagtaagacactgcaagaaaagaaaaatagtcatactagtgaaaaggaagaaacataattgtctttatttgcagagaatatgattatctgtgtataaatattaaagactctaccaaaacaagctagaactaatatgtgaatccttttgccagtggtgggtcttgcttccacgttgatggctactgactgatcagggtggtggatgctgaaggttggggtagttgtggcgatttcttaaaataagacaacagttaagtttgtcacatcgattgactttttcttacacaaaagatttatctgtagcatgtgatactgttttatagcatttatctacagtagaacttctttcaaaattagagtaaatactctcaaaccctgccacttgtttctcaactaagtttatgcactattctaaatactttgttgtcatttcaacaatattcacagcattttcaccaggaatagattccatctcaagaaaccactgtcatagctcaaccgtaaggaagcaattcttcatccattcagttctgagcatgagattgcaaccaattcagtcccatcttcaggctccacttctaatcttagtcctcttgctagctccaccacatctgcagttactttccccactgaagtcttgaacccctcaaagtcaactttttccaaactcctattattgttcatttttttacttcctcccatgaattacaaatgttcttaatggcatctaggtaggtgaatcctttccagaaggttttcaatttatgttgcccagatccatcagaggaattactgttgatggcagctattgccttacaaaatgtatttcttaaataataagacttgaaagttaaaattacaccttgattcatgggctgcagcactgatgttgcgttaaacaggctggaaaacaacattaatttctttgtacatctccatcagagttctcaggtgaactagtgctttgtcaatgaggagtaatattttgaaaacaaaaaaatcttttttctgagtagtaggtctcaacaatgggtttaaaatattcagtaaaccaggctgtaaatgggtgagttgtcgatcatattttgtttttccatttctagagcacaagcagaataggtttagcataattcttaagggtcctagaattttccgaatagctggtgagccgtggttttaacttagtgtcaccagttgaattagcccctaatgatagggttagtctgcccttgaagctttgaagccaggcattgacttctcttctccagcaatgaaagtcttaggtggcttattttcccaatagaagtctgttttgtctgcatttaaaatctgtggtttaatgttgccatcttcatcaataatcttagctaaatcttctgggtaacttgctacaacttcttcatcagcacgtgctgcttcaccttgtacttttatgttatagagatggtttctttccttaagcctcatgaaccaacctctgctagcttccaacttttctgcaacttctttgtctctctcagccttcatagtgttaaagagagttaggggattgctctggattaggctttgacttaagggaatgttgtggctggtttgatcttcttacctgaccactaaaactttctccatatcagcaataagtctgtttagctttcttatcattcacatgttcactggagtaacacttttaatttccttcaaaaacttcttctttgcattcacaaattggctttctagtgtaagaggcctaggtttcagcctatctagctctgctttttgtctgtcttcctcactgagcttaatcatttctagctttttatttaaaatgagagatgcacaactcttcctttcacttgaacacttaggggccattgtagggtaattaattgtcctaatttcaatattgctgtgtctcaggaaatatctaagcccaaggaaagggagagagaaggggaaatggctagccaatggagcagccagaacacatacaacatttatgggctaaattcattgtcatatatgggtgcagttcatggtgacctagaacaattacaataataatatcaaagatataataataatgaaaaagtttggaatattgcaaaaattaccaaaatgtgacaccaaaacctgaagtgagcacatgctattagaaaaatggtactgatagacttactcaacacagggttggcacaaatcttcaatttgtaaaaaacacagtatctccaaaggacaataaacaaagcacaataaaatcaggtatgcctgcacaatagcctcagaaatagaaactgctggggaataaatttaacaaggtaggtgcaaggcctataaactgaaaactacacagtatggctctaagaaagtaaacaaaagctcaacacatggagagagatgacatatccatggatcagaagatttactagtattaaattgtcagttatcttcaaatcaacctatagattcattgcaatgctaatcaaaatcccaacagcagttttgttgaaattggcaagcatacacatatgtgtgtgtgtgatatatatatatatatatatatacacacatatatatatatatatatatatatatacacacatatatatatatacatatatatatcttccccctggctatatatatatgtgtgtgtgtatatgtgcatacatatatatatatacatatacatatatatatgtatatatatatacgtgtgtgtatatatatatatatatatatatatatatatatatatagccaggcacagtggctcatgcctgtaatcccagcactttgggagactgagggggggagatcatgaggtcaggagttcaagaccagcctgactaacatggagaaaccccatctctactaaaaatacaaaaatcagctgggcgtggtggttcacgcctgtaatcccagctacttgggaggctgaggcaggagaatcacttaaaccaaggaggcagaggttgcgatgagtggagatcacacccctgcactccagcctgggcaacaagagcaaaactcatctcaaaaaaataaaagctatatatatatatatatatatataatatatatatatatataatgtacatgtctacatgtgtatttacttatatggaaacgcaaagatccagattagctaaagaaatttgtaaaagaacaaagttaaataactcatattacctgatttcaagcttactataaacctgcagtagtgaagacagtgtgcattagttaaaggacagacttactgcttaacggaatgaaataaagaggtcagaaatacacccgctcaaacatggtcaactgatttttaacaaaagtactaagaaaatccagtaaggaaaggatggtctttttaaaaaatgtgctggaaaaattgaacatccatgtgcaataaataaaaaaaggaacttgacatcacaccagacacaagcattaactcaaactaaattgtagacctaaatgtaggaactgattgtgtatattctggaataaaatataaaagaaagttattgtgaccttagattaagcaaagatttcttagatacacgaaaagaaagacccccaaaaaatgatcaattgtattttattataattaaagacttttatacttcataaggcaccattatgacaatgaaaaagcaagccagaactgggggaaaattttcacaaaacagtatctcataaaagacttgtaaccaggatatataaagaactcatacagtgcaataaaaaataaaaattagcaaaattttttaattgtcatttcacaaaagaatgtttaaagatggcaaatcagcataagaaaaaatgtgcaacatcattagacattagggaaatgaaaattaaaatcaaagtgagataccatcatacacctattagaatggtgtaaaaaatgccaagtgcccagccagaatggccattattataaagtcaaaaacaaataaatgttggtgcggaggctgtggaaagggaacatttatatactgttggtgggaatgtaagttagtacaacctttatgaaaaacagtatgaagatttctcaaagaactaaaagtagatctaccatttgatccagtaatcccactactgggcatgtaccccaaggaaaagaagtcactgtatcaaaaagacacctggaggcatttttgttgctgcacaattcacaactgaaaagacatacaatcaacctaagtgcccatcaaccaatgagtggataaagaaaacgtggtatatacacatcatggaatactactcagccataaaagggaatgaaataatgtatttagcagcaacttggatgaaacaggaggccattatcctaactgaaataactcaggaacaacaacaacaaaaaaaaaaaaaaatattgcatgttctcacttataagtgggtgctaaactatggatacccaaaggcatacaaagttgtataatggacattggagactcagaagaggggagggtcggaggggatgagagatgaaaaattacctatttagtacaatgtccactatttaggtaatgggcacactaaaagcccagacttcaccactatacaaatcatccatgtaaccaaaacctcttgtattcctgaaactatggaaataagaaaaaattgaatgtcaaatactgcccaaaatgtaaagcaactggaatcctcatcctttactgatgagaatacaaagtggaaaagccactttggaaaagagtatgatagtttcttataaaattaaacatatgcttctatgcagtgcagccatttcacgcctagatatttacttaaacgcaaaggaacattcattcacacaaagactagtatacagatgatcagggcataatatctcaaaattggaagcaacccaaacacgcctcttccagtgatagaaaagcgcattctcctatggtcttacaatagaatactacacagcaagaaaaaggaatgaattactcatccactaaacaatatggatgaatctcaaaagtgttacaccaagggaaagaagccccagaagacaatatttgccatgattccatttctatgaaattctcagaacaaaaaccagtagaagaaacctttttggagtaatggaactgttctgtgtcataatcaagcatgcgtcaaaactcatcaaattccaagattaaatatggaaactttgattctatgtaaatcttacttccataaagctgattgattaagagggtgcttagcagatcagctttctgagtcttcactgagtctttgcccttggaccaaattccacttttgagtgatggctaaactacgcatgggattttcggtcccactatttcttctcctccaaatgtcgaaagcattgtcttctagcatccaattgttacttttgaaaactcaaatcacagtctgattctcatgaggtgacttttttctcttgttttaatttttatgacaatgatgttaacaaacacttactgagagctgcagtgttcccaggcctgttctccacaccctactcccagcgccttgggattgctgcatgataaatccagccataacgtctttttcattgctgttctgagaactcagagaacttctccaatataaagactactatcctttgggggcggtttcttctattgtttcctgaccattattttctttctcagcatcttctgttttctgctgctagtacatccaataataggcattagagctcttgggattgatcctttatttctcatatctctcatcttataatttctcctctttccagactttttattgcttcttttattttggcaatcattattttaatctctaagacattttctgttttctgagtgatccttctccctaggctactattcttgttcttgaatgtaacctcttcttgaaagacattgaatgtgctttcagaacatttgttttatcttgatcttacattggcctttctcttttacctgctacacagacacacacacacacacacacacacacacacacacacatctctgatgatccttggttgtctactcatagataagaagggtgaggtaggtgggtgagcttcctgcaaggcaagttctccaagtgaagattctgctaagagttctttgggaggcagagaatggcagaaaaaaaattgaataacaggttttggattaggtgaggagggggttggaagagcgggtaagtcaggggagggtggggggaggagacacctgatacctaccaaaatgaggagttcagtcagtcctatgcattgtcattcaaacagaaagacatagcctttttcaggaaatatgttctgtttgtttgtttgttttcttgcctgtgttttggtgtaagggtcccctttacctctccctgaaaaataaattccggcaacctgaattcaactcagcatgaagaaacaggaaaggaccatccttaggttgtacaatgacctccaacaaatccacctacttctagaccaactctactcccctgttctctggcagccaggttgtctctgagccaggaacctctcaggccacctaccttccacctccttgccaatctcttgctgcacattctggtccatgctatttttgaattattcatgcacaagcatactactatccactctgattcagaataccttttcaccctggttgaagacctgctccctactctcttatattcgactttctataggatttttttgtgtatttgttttaactttttttcttttgtttgtacttccatctggtcatcactaccggatctaagaaaagtggagtgtaaacaactgcaccttcattgttttaaggtaaaagtcctcttcacccttcatctttttcccaccaaaactgcttctgctaatggaatccgtattaatccgttttcacactgtggataaagacatgcccaagactgggtaatttataaagaaaaataagtttaatgaactcacagttccacatggctggggaggcctcacaatcatggcagaaggcaagtcacatcttacatggcagcaggaaagagagaatgaaagccaagagaaaggggtttccccttataaaaccatccgatcttattcactaccacaagaacagtatgggggaaaccgcccccacgattcaattacctcccactgggtctctcccacaacacatgggcattatgggagctacaattcaagatgagatttgagttgggacacagccagaccatatcagaatctaccaccacagccctgtataagtcactatgataaaacgtggtgaaaagttctatgaccattttaaagatattaaaaacatttatatattccttataagttctacacatttgtcaagcaaatcaagatgaattttataataacaaagatgaatcacataatcaatttttgtatattcttacttaatacggttcttgctttgccaaagactgaatggtcagttttaattgttcactataattttggttttccaataacaactttaaaaattgctttatatatttagaggttgttaagtggggcataaaagttcatggttactctaactttataataaagtggatcttttattgaagtaagataactatagtccgttaaatttttttattttacattttattttcccagtacctaatattgtcagtgcatctttctttggtttgtatattcttagcatgcccttgtctatcccattattcttactttttctctgaaaatttgattttgttgtttctcctaagtagtaaaaaagcctctatttctatttggttttgatcgctgaaaaaaatgtaataccactcattcatttaacaaacgttttttgagcaaatgctgtgtgttagatctcatattcaaaggtggaaagaacaaaaattgtcctagccattataattgttgcaccttattttctctacttaggtatacagacgttttggtttttagctcattcttcaaatccttacctttggattaaaaggaggaaaagaaaaataataatacattacttattcattatttaaaaacaaattttcttaaaaaactagaaatacaagatctcctagagatcataaatgacaaaaagcatgcccaattttattaattctactaaacattttaatggaggttctaaccagtgcaataaagcaagaaaaataaatataagacacgtcaattttggggaaaaatattaccattatttacagatgacatgactgtgtacaaagaaaatccaaaagaatctatatacaattagaattaacatagaacctaggaaaggtgctaaataccaggaaatacacaaaaatcaattttatttctatataccatcaacaaacagaaaataaaatattaaaaattaatgcttgcattagcatcaaagtacaagaaatatctagaaataaatctaataaaaatgtgcaagacatcttcactaaaaactacaaattattattgagagaaaccaaagggaaatctaaataaatggaagatttgatttgtaaagacacaaagcttcccaaattgccctattgctctacaaatgtactacgatcccccaaaaatctaagcagaggtgtgtgtgtgtgtttatatataaatttacaagatgactcttaaatgtttatgaaaattcaaagggcctacgatagccaaggaaattgtaaggcgaaaaaaataatctgcaaaactcacattaccacatattaagacttttaataaagctataataaataggtcagtgtgatattagtgcaaagatagatcaaaaaaccccaagtgaaatagaagaaagagttcagaaacaaaacacaccaatattcagccacctgatttatgaaaaatcaactccatagtatagccttttcaataaatggtgctaagctaattgaatatctagaagagaaaaaaatttatcttgacccctatctcacatcatacacaaaaatcaattccagatggactgcagctctaaatgtaaaatgttaaacagtaaaactttaagagaaaaacatcttgcaaatgtgagtacacacaaattcttttttttttttttttttttttttttttttgagatggagttttgctgttgccagactggagtgcagtggcacgatctcggctcagtgcaacctccgcctcccaggttcaagtgattctcctgcctcagcctcctgagtagctgggtctacaggtgtgcaccaccacatccagctaatttttgtatttttagtagagacagggtttcaccgtgttagccagatggtctctatctcttgaccttgtgaagtacacacaaattcttaataaggagacacacacaccacaaatacgacgaataagaaggccaaccacagcatggtagaagaaacatacacacacacatatacacacacacacatctccagcaaaggtcttttatcgaaaaggtactagttaatttgaaaaaaatattttttaaatagataaatggtccgaagacatgaacagatagttcacaaaaagacttctaactgaccaataaacacataaaaaggcatttaatactagtcagggaaatgtaaaatgtcatcagggaagtgtaaattaaaattaaaatacaatgctctaatcatcacagtggctaaaattgaaagaatagaaaatgctgatgtatattgatgaactggaactctcatgcacccttcttgatggtgaaaattgcaatattttggaaaagtatttggcagtatctactgaacctgaccatctgtgtatctttgcctgagccattctactcctaagtgcatatgcaaccaaaatgcacagatatttttaacaaaaaaaagtattagtagatccatggcagtgccattcatattaatcaaaaactggaaactcctgaaatgccatcaacagtcgaatggataaggaaattgtgatgcatcatacaatggggtgccctccagcagagaaaacagaaaatcgacaactgccttctccaaagaaatcttacaaacataatgttgagggatagaatctggaagaataaatgcatactctatgactcaaaattatttttaacaagagtctggatagtgattacccttggcgggggcagaaacttccttcttgggaaggaagcaagaagtaccctctaggttttagtcatattcttcctattgatctacagtgcttattacacagctgagttcattgtgtgcaaattcattgagctgatcgtacagtccttttctgtgtgtgtgttatactttcataaagttaaacagaaataaaagacaacttacctttatttttttatttatttatttttatttatttatttatttatgagacagagtctcactctgtcacccaggttggagtgcagtggcaccatctcagctcactgcaacctctgcctcccaggttcaagcgatttttctgcctcagcctcccgagtagaggggactacaggcaagtgccaccatgcccggctaatttttgtatttttggtagagacaggttttcaccatgttggccaggctggtctccaactcttgacctcaggtgatctgcctgcctcggcctcccaaaatgctgggattacagaaatgagccaccgcgcctggccaacttacctttatttttataattgttggttctacatgaactgaacacaggagatactatgtttagatcatctttgtaaaatgagaatatgaatattgttcttctccaccctttttagctttcttcattagaaatatttaagcccaaactattgtcatttttagcaattgttattttatgtattgcgcattattttgcattttgtgtaatagccacgttgaccccaattatatagacttaaacatttagctggatttctgttcttattttagactttttgtagctcatactctctattcctgacttacagattttgattcacctcccatttaatcgggaaacatctttcgagcggctgttatagaaagaatagctgattcatgatttttgtcatatttgataggattggtctttcttctacctccttatttaacacttgttttctgcttattacttgtgggtttgttttttgtttgttggttggctggttggttttgagacagagcctcgctctgtggcctaggctggagtgcagtggcacaatctctgctcactgcaagctccgcctcctgcgttcacgccattctcctgcctcagcctcccgaatagctgggactacaggcgcccgccaccactcctggctaattttttgtatttttagtagagacggggtttcaccatgttagccaggatggttccgatctcctgacctcgtgatgcacccgcctcggcctcctaaagggctgggattacaggagtgagccacagtgcccagcacttgtgggtatttttttaaacttttgtttgtggacctagtttcgtttgctcttttcaaaataattagtaatatggaaattaagcatcttattactatactcacatggttggactaaaattttgagaaaatatattttttcctacttatcaacattgaaaatgtacaatatctctctactcacccttatgtaaaatgataaattctgtgaacgtcttatgtaaaatgataattctgtgtaccctcttaataccatacactctgtattctcaatcttagttgatatatatggaatttaaatatttccactaaataacttatttttcgcctttgccataaactccatagtcatatttaacacaattatcctgaataaatattgtttcctttttagtgctttgtgccatttcattttcactacatcttcccatttcttgagttctgtattatttatatgcccttcattcagctggagcatttctttgagtttttttaaatgaagggcacgtgggtggtatacttcctaagtactttcatatttcaaaatcttcaaggttgtctcaggaatgatagtctgagaggatgtaaaattgtgttttcaattaaaaataacctcttattattacaaaggcagtatatgtacacagtagaaaattagaaaatataggtaagtaaaagtaagataataaaaccaccatatttccactactaaagagattaccactgttaacactcagatgatgtcctctcagatctattgctatgcacatagatgtgcattttatcaaagtaagattatactgtgtacattgttttgcaacgtgcttttattcaataaataaatgtctacttgtccatggcattaaactgtaatatcattgatatggtttggctgtgtcctgacacaaatctcatcttgaattgtagcttccataattcccacgtgttgggggagggatctggtgggggataattgaatcatgggagtggtttcccccatacagttcttatggcactgaataagtctcatgaaatctgatggttttataaggggtttcctttttcacttggctcccattctctctcttgcctgctgccatgtaaaatgtgccttttgccttctgccatgattgtgaggcttccccagccacatggaactgtgagtcctttaaatctgtcttcctttataaattactcagtctcgtgtgtgtctttatcagcagtgtgagaatggactaatacgaccattaaatgcccaagctgtactcaaatttccccaattgtcttttaaagtgagtttgcccaaaatagatgcaatctgggtggctattcccttattttatgtcaatctggaacaagccctttttcacgatgatggttgttgaaaagagtgggacaaatgctcatcttctagatttttctactcagctctttctgtaccattattgagaagcaatcatctttctgcaaatctctatattctgcctggcctcctgtcatttagcattgcagaagcaaattcagatagcaacttaatttctgccccttcttcctgacttgtattgtctactcttgaacttcaaaaatgtcatggagcactatctccatggggagctgttcattaattatgactggttctcaggtagtcagtgagctttcatctaaaagctaaagtttttattgagctcaaatacttttttttgtttttttggtctgctctgctatttccttctggaatttctagcgcatgtgatttgaattttctggacttacctcctgagcttgtctccttcctgttctttgattcattttcatctcttttctctgagttataagaaagcatcttccagttcatggatctgggaatgaacacaagggtggaattctcagtgttaacacatgactcaagggcacgggtattagcaactccaagcagcatccgttgagttcttccctgaatcaggttctagtctgcacactgcaaggatcatctcaatcaatcatcacatcaaacctattaggcgaggattctcactaaacccattttacagatgatgaaactgagacacctaggggatacataacttgcccaattacatggctaataagtagtcagcctgggattcaaacccaggcttctcctcgctctctgcactgctgggaacctggattggtcccaccctgcctgtctcacagccctattgcccccaccccttgttagtgggctcctacttaactcctttccaggtaaattgttcatatgaatgctgccaatgatggacaggcacatcactggtctgccgctttgagctctacatttcatagaaatgttgtcaaactgttgtgatgtggctggctaccttccctgatttccagtgtggacacagattttcccctatatacattcccttggatatttccatggaaaacctcatgcttagtgtacctttagaggtttctttatctcccctaccaaaatgcaagccagcatgaccattcattcctattccccatcactctcatttatcctctttggttttgcaagaaattgacccatgtaatgcattcattgtggccttgcctcacagcccagcaccatactgtccaagtgaaatgccctttccctcatcctccccattgaaaatccttatcaaccttccatgggcagctcaaatgccaactggcccttaaagcgctccttcaccccattccatgtcctgtgtcctctccttcctcagatgtcccttaggaacctctactccccagtggcctgctctcagtcaggatcccagcaccaaacagatggtgcatcccagggaagataatccagagagagtttatgcacaaaggggtagactacaaagtgataagtgtctgttgtctggacctaacagaaagagagaagaagtcgtccccggggcctggaaggagagaatcctgcattgttttgagaatggcagagactttcagtccagggagaaactaccccaaggccattgcagagggagagagactcatccgatgaaatactctcacctcagtccctctcttcctccctccaggctcttgccatggttcccctttgtcagaaaacaaccagagggcatgtggcccagcaccccttgatataatcatgcacatcagccacctggggctgagaacagggaggagaaaggaaaggggtgagtgctgacaggcaaaggaaggtatcagctacagactctgccacttgcattgttcatggtaatcatttacatcttaactttccctccagctcttgagggtgggcaatatggctctgcatttcagtaccccagtgtctagcacggcagtgggtatgcagcctgagctcagtgaagttgcttcctcactcatgaggaagcagtcacgttatgacttcctcatttgctttgttattctagaggtggaaaagggtggcctgagtcatcttaactccattcttgtgggattgtgaattctgtgggattggggggttgggggattctggtgaggccgtggacagattctttgcaacatgtatgcctggccctttcgatgtgaaaccctgcagctggcgtcacctgtgttgcattctgaatgggtgagccaacccaggctccaccatctgtaccaggcacagggagcaccagcaaccagccactgccttgtgtcatccttgtattccttcatcaatcgatgtgttcgttcatttgttaagcactcattcagcagctactacatacagcaagggttccaaacccatatggcatcatgggaaaccattccccactcttctggtaacaaatctcacacataatccaggcctaatagtgctcatgagaaggtgagagaatgggaacaagagggaaagggatgggcctgaaggagcacagctaataagcagcaaagcacagcttgagagctaagtacacgctagcacactgcccagacacacatctcagggcccctggaataaaggtgactgtgttcacatcagagtgaatgtgttaatgagaagaaagagggcctggcacagcaactcactgttctaatcaaagcactttgggaggctgaggtggaaggatcacttgagcccaggagttcaagaccagcctgggcaacatagcaagatccttgtctctataaaaacctccaaaaattagctgagcacactggcatgtgccttgtagtcccagtgactcaggaggctcaggcagcaggatcacttatcaagtgaggttgaagctgcagtgagtcgtgattgcctgccacctggggtgatcatataatttgttgtgtcaactggaccactttacagacagagaggtgtgtggttataccacgaaaacaagcatttaccttcactgacccagaccagtcagtgtgtatggccaccctaccagaagcgccaggcatacatgttgcaaagaatctgtccatggccccaccagaatcccataatcaatgggaacaccaagaaggaagttaagatgactcaggccaccctcttccacctctaaaataacacacacagaaaaatgtcatatcatgactgctccgtctctcaacgcaacctcactcagtccaggcagcacacccacccaccaccatgttaggcactgagtacagacacttcagcctgggcgacaaagtgagacactgcctctaaaaaaaataaaagagagagaggaaagaagtcctccattctggtgttcgtgcatggcccctgtaagactggataactgggaggccgaggcgggcggatcacaaggtcaggagattgagaccatcctggctaacacggtgaaaccccgtctctactaaaaatacaaaaaattagccgggcgtggtggcgggcacctgtagtcccagctactcggaaggctgaggcaggagaatggcgtgaacccgggaggcggagcttgcagtgagccaagatggcgccactgcactccagcctgggccacagagcaagactccgtctcaaaaaaaaaaaaaagactggataaggtccttggcttttctcagtttcatgatgtgaccacatcatgtgagcttgtggcagtggaaatacgtggtcagggaggtggggcatccaagcaggggaaagggagcattcccatggccaacccacccacacagcctccacccaagggcatcccagcttggaaactgactttggaaacacaacatgtgagactgtgattttgattagaatgacatggatctgagacagctacattttttcccaaggaaaaactctctccaaacaaagggtgaaagagaatcattgtttacttatgctccattcttcttaatttctgatattcttttagacaactgccaagtccatgcagaaacagctcttctgatgtaataaatgtagactttgatctgacactcaccaaagccattctgaagaatttcagagcagaacaacttgagcaacaagtcataaaatagatgtgagccttgactttattttttttaatttaccaataaactaggtctcaagagttaaaatgagctttttttccccagaagtaaacacttgtacacactttaagtgacattttttataacattcctttttttttaggatgagcatagagttaatacccaggagcaaacgcatcactgttactgtccttagaacatgtgctgatcacggccttggctgcacacagataaccctgaaacagactctttgatctcgcttctcccagtctgtaactttttttttttttttgagacagagtctcactctgttgcccaggctggagtgcaatggtgcaatctcagctcactgcaacctccacctcccaggttcaagcgattctcctgcctcagcctcccgagtagctgggattagaggcacgcgccagcacgcccagctaattttgcatttttagtagagatggggtttctccatgttggtcaggctggtctcgaactactgacctcaggtgatcagcccaccttggcctcccaaagtgctgggattacaggcttgagccaccatgcccagaccccaatctgtaactttaagtagggtttccaagtcacctgggccaatgcctaaaatgcctgccacttgaggtgcatataatttattgtgccaaccaggccactttgcagatggagaggggtgttattcaccaggaaaacaagcatttaccttgaatagcccagaccagtcagcgtgttccaccatcccaccctgaaaaaaagatggctacatcagcgttgtgtgtatttccaccaacctggtggagacctctttattcagggtaatgatacaggaaaaagggcagggagcggtgtcctgtgtgggccagcagtagcctcaggtccccccactccagggaaagcagagcaattgcagagtcccagagactgtgcctgggacccccacatgtgggaagacccacccatattccctggcattcatcactcggtcagtttccccaaacactgacccaaaacccactcttgcaacaatatttatgagcatactttctctctctcttgctttttgacatcaattaaatgaagtattggctgcaactagtttgtccagcagtttctatgtcagcgaatgatctgggtaaggagatgactggataactcttcaccttcattttcagctgagaaaatgccagtttaccatacgggtcacattcctggggcccttggctaggaaagagtggctccattttgcacacctcccactgtttctcagtgtctacaatgctcaaatatgtgcaaaggagtagcactgttattcacatcataatggatactaacaatagtagctattacgcgtgaagcacccatactggaccaagctttgtaccaggcacttacttataacactctcataccccgataatgaaggtatatcaatctccagcctacagagaaggacactgaggttcagagaggctaactgtcttgctcaaggtcacacagctcagcagtgctggtgttgacatcccccagaatctgccaaaaggtgagaaatttcaagtcacacatttgcctttaaaaatcagtttgcctcccaagtagccttgcagatcactgctattggtgaccagactttatgcaggagacgagaaaacaggtttatgtctttctctgtccctgaacattggggagtgagttggtaaagagcatgtaccctaaagagtacagcgtttttgttctgccatcaatgagtgtgctctttaaaatatcccatttattcaccaacatggtgctggataggtcaaaatgcaaaactaagaaagacagcacaggaacaatatatttttagtgccttttaattgaagtaataatgagaattgtatccacagcatgctccagcaggtttgcaagatgtaggtgctctgcctagatcctctgtggacactgcatacctgagggctagacacgttctgatcatgcctgctaagccccaaatcacaaaggttccccaagtaccagcaacttggaggaaaccctgggaagaacctggctgacatccttagcagaattttctgggttccaacaactgggttagcagaattttctgggtttctctatttcccttccattcctcctctctgaatgagagatcctacagagtgaatatttaaggctgatgttttccacccagtgtgctcctgcagcttagaaatggacatcacggcttgaaagaccagggaaaataaacatagggccgaattgagtgagtcctggcgtgagtcaacatggatgccccatcctcccattctgagcacaaagggtgcttaaaactttaatgaattgaactctatgagtaagggatgttaatcattttaattacccagcagcttgaaatcagatataacagtccaataatgtatctttaaacgaataccaccctgccctataaaaaatcccttccaaaccattctaataatttctatttatcttttctgacgttaactgttatccagcccagccggccaacagacagccttcccctcacatttggtttaaatgcaatgccgtctagtttttcaataccattagcgtccccctggtgggcagagagcaaggcagtggcaccggtcacacttcactgctttatctcatatgacaaagagcgatgatacgcttcaatccaggccagcccggcagagggaaggtggccacacagaactccccttgctgccgagaaacgccctctgtgtgacttactaacagcatgaaggggcagacaaatagattttcctctatatttataaccagcatcattcttcctttcagggcgttcagtgcaggtagctgttttatatgaaatgaacaatctttatagacgtaccagagccataacaagcctgattttcagcgaagctgaggtatataactcttaccgaattgtcaggctgcttgctcaacaaatcaagcctaacttatgatgtttgcagtgtaatttttattcctgtttgactagccaactacccagtggtaataggatgttaggaagggcagtggcgatgtttgtgcatgccgtgattgataggccgactcggcatttttcatttatatctccagattccaaatcagttaagtttaggaaaaatgaaacaaagtggcaagaaaaatgtttgcagattgcagaccggcgctcctgccgatctgagttcagcccacatctgccgggattgtctggaaacattaagatatctaaatgaaaatcaatactatatgtgccaggcatttactaccaggaacaagcatcaagagacctgagctaatcagacttccagcttgtgcctcagccctagactgaaccccaggggtgtcctaattgcccagactaatcatagaagagttaaatttataaccaagaaagacatcttgtttttcttaccagtcatcatttaggagcggaaaggctcacctgtgaagtgggtgccagatgtacagtgggagcccccattcaagagaggatggcttctcacctgtcaggggaaaggaaagacaaatttactgtcagcagtaaaaccagtcaggctcattgaagccccaggtgggagagtattccatcagctcaaacacgcactgcagttctcctcattgaaactctccccacttaacccccatgttctggaacatgaaagccccttgcacactttgatccatggcctggtttttattttaaggaaaccgctcagaaaagcagctggcatcagtgacattaaaaatatatgtatctgtttctccctgagttccactctgtgcttttttgtcccttggagtctccagaggagctaataacacttggcgacatgtatctccctaatatactgtacaaacaagtcactgatattattcacactccaacaaactacaaagtcacacaatagcaattggacgagcccacactatactgctgaaaaaccataatgtatcaggggactggattcctaatatttgcattctagatgccaactgtgagcatattttgtactattttcaacaaattacaccaaaatatgcaaaatgtttataaggctccatcttctatttttggctccgatatatttgcaacttaatagtcctttagagatttgtttgtctccttgggagaaacaggaaagtgggaaatgaaaaaagcagaaagagagagggagaagagaaaagaaacgaagacactttgttcacgcaagttgagttctgcgagtttttcgtaaagagcggagccactctccctggagaccttcttcgacaagaaatttaataacattatttggattccttgtgtcccagatttcagatgtatttttaatgcatgtgtcttgaaacaaaacaaccattgtcaaatgctgtatcctcttctcaccagtttaaatggcttcctagacagcacgattctgggagcatcttgaaagtggtgatcaatgaaaaactgcgccttgctctctgtggcttcccaaggatgttcaccccttaccacagaaggttgtcagctctcttcccaggaaaggtgtctctggtccttgtgatgtgaacgatgacagcctcttgccttctgttccatcattattgcctccacgctctagcaactgggtgcaggcacacatctgtctttcttgtcttcaaccctgtgatatcaccatccctgactgcactgtgcctgtgtaggattagggctgatctgttcagcagaatccaggataggggagattaaaatgtacatgggttgaagagggcagcagttttcctgatgctggattacacagccaagttgaaaacttttcaatccagcttctcccactggaaaaggtgtcagacaaaaaactaatttttttctaacgttatgcctaatgaacttaacccagcttaacctagagattgggcctcatgcccttggttcctagaaccagttttcctaacaagactgaagcttcagccgaattcattacttactcagaatgaataaagccagaggaaaagatatttcatgaacaaatctgtgttcttagctgggcttcaaggtaaaaaaaaaacaagtgaaaaagagtgcctggcttcccatgtctttgtacacacagcaggccctcaaaatgcatgtgtaggttggataaaccaacacatggtggatgaactgggaagtcacttgagttggacgtacactcaaaaaaaggtaaagagaccaggcacggtggttcacgcctgtaatcccagtgcgttgggaggcctagcggggaaccaggctgggggacgagggtggggggatagcttgaacctaggagttaaagaccagcctgggcaacatggcgaaaccctatctctaaaaattttaaaaattagccaggcacagtggcacatgcctgtagtcccagctactcaggaagctgaggcaggaggattgcttgagcccaggaggtggaggctgcagtgagctatgatcatgccactgaactccagcctgggcaacagatagagaccctgactcaaagaaaaaaaagaagaggtacagaagcatattcaaatggagagactgaggcagaaaggagcctcaggacacatcaggcttcaggctttcctctaggaacactccactgctctgcacaccaagcttggaatcagaggcagccagaccttgatttgcccccaggacaaaagccaacagcctacggctgctgggcaggatgacttcaaactcattcctcagccaaacagggcctctcaggaaagcaggcttgacaaagctaggtgtggctctcaactcaggggagctgaagccttcacaagccctacgtcctgtgtcccagctccacagtcctcatgggacctgctcctgtggtcaggctcacgtgcacagtggttgctgtgaaatagcctgtgtggtgagaaaactcctggggtctcagctagaaacgctgactggggttgcagcttttccagctgtgttgatggccaggctgggaagcctgctagaggccagggagcaaggcagggccacccagacaaaacagtcagtggagatctcacccagggagcccagacaattcacaacagaaacagagctgctgcttcctgagggctttccacgtgccaagcactattcctggagttgtgtgtattttaacttgatcaatcttcaaaatggcccggcaggtggaccctattattagcccacaggggagatgagtaacttagctgcagtcacaaattgctgagggacaaaatcagggtcttgtccctgtagtcaggtgtggagtccatgcattttgcagaaggaagtctccgggggggctcaggaacagaggccctgcctaagtaggtaagatggcagagagtggacccaaggtagaaatcagatcatatttatatgattcataagataaataataatactaccataaagccacactcaacaaaaaactttaatatggaggccaagccagagctgagcttccttaagtgagatccatagaagaaggaggctcaaacggaaatgcagttgaaataattataagataatcacttgggggcattcggcagtgggactcacttgggctttatcccccgttctgacactgaccaaaagaaacagcagtcagttaccaatggctttggcttcgtctctggtattccaaaaccctgtgctctgactgtcatctcacaatcagaaaaccagaaagacagctgcttgccactcccagagcctgcctgcccagcgccctggcctcctctgggaccacctgtgcacccctacgtcaccatcacagcccagcagagtgaaacttcatcagcaatatttttcacaagacagaggccacatttgtaaagtgacccttcttctgccttttggctctagaagagaaaggggcgagagagcagaggaaggacgaggggatgttcaccctgcggactgagtcaggaggaggacgtgacttgtttaatcctaataaatcagagcatccccgggaggtggaagcaacaggggttggtgtgccagccgcgctgcacattgacccaaggcagagctcgtggagaaatgatgtcctcttaagcagactcctggagagatggtccgcatttctcctgacaaattagaagcgccgtgaatgcaaccattcctcagaaaataggcctgatttagcaatgcacaagctgcattatctcgctgcataaaaagaccatttaagcagggaagcctttaggacactggccctttggagaagcagttctgaaatattacccacctcgactgccacctaagccagtcactccccaagggaaaagccacatttacaacctagaaaaccaagcaggctttagtcaaaggaaagggtcatttgtctctggtatctgcatgagatttcttgtgcccctgtcctgctcaagccctcacctcacctccagtggccaagccaagtggagagctactgtatggggaataccagtttcatcctatccaaggtgtgttgccctgttcatggcagccagagccttagccaacccgttgaataccagagcaattacaaagcagatctggtgacaacaatgctaaaaagttgaaataattcatttgcacaaagtgtgcatgtttgaaaacttttcatgcaaagattacaacctgtcattatcttccccagagacgcactaccttcttaaaaagtatctctaatgagatctacaaatctgttgaagacagcttactttattgtgtttgtaaagataaaaatgttttaaataggttatggctcctgggactgacagtcccaccatgagggtaaggtcattttgaaatgttaataaaagttttcataaaatatgacggcgctcaaagagtaatgtttggatgtaaaaataactataaaagtataatttctaccagggtacacgtgcagtttttctgtgtcaagatatttgcccaatttctcatttgactggggttgcagcttttccagctgttttgacggccacactgggattcgatccttattagagaggtttgcagcaggctttccgaggcttagccggttatattagactttcccttgaagcaaagtcttgcactgccctgaccattatgcaaatacgcaagcactcagcctaggattgtctcagcttgcagtagacatcgctgtcctcccaccataggagcaagacaagcaagactggtaaaatcagcagggagggggaccctgggggcgtagcctcatagctcccagttcctgggctagtcagggggaacatgccaaattggaaacattcagctgtttcctattcaatgagctccttcgtatttgaagttaaccagcccaaaggaaatatctcagaaggattttctaggtgatgagataactaatgagaccaatccgtcctctctgtttgccggatcccattgactcaaatcaaccccgatatttctattaaggcacctgggacacgtggggtcccccaggacccaaggttgggaacaaaactccctgcagacagtcagttaggggaaacttaagacatgctggaatcagggatcatggatttgggacaagaaagagatggcatcagagtcctacctacaaagtgtcctggttatggaacattcagcaaacgattcctgtcctcagcattatccagaattttaggtactgatacctaacacatataattgtcatggacataaggggacacactccaccttcttcatcctcttcccattctcctacacaccccaaggaacattcatctgagacccaacagattggctgctctcctctccaataactataacatgcgacataaatgtgaggccctaagcacttcaggactattacccacaaaacctggccctgacaaataaaaatgcttttgactgtttgagcccaggagtttgagacctggctgagcaacataggaagagcctgtatttacaatataaaaacatataaacattaggctgggtgtggtggctcatgcctgtaattccagcactttgggataccaaggcaggcagatcacttgaggtcagcaggtcgaggccagcctggccaacatggtgaaaccctgtccctactaaaaatacaaaatatatatatatatattagccagcatggtggtacatgcctgtaatcccagctactcaggaagctgaggcaggagaataacttgaatcaaggaagcggaggttgtagtgagccgaaatcatgccactgcactccagcctagatgacagagtgataccctgtctcaaaaaaataaataaataaataaaaataaaaatgaattgggcatggtggcatgcacctgtaatcccagctactcgggaggctaaggtgagaggatcacttgagccaaggaggtcaaggctgcagtgagccatgatcatagcactgcactccagcctggatgacagagtgagaccttgtctccaaaaatactttagaaagtattggttctgctctatcaagattctcttgaagcagggtagtaggatgccacagctcctgagcttgaaggaatttggttggcagggggtcagggagggagaatcatgtaagaaaatgagggatggaaacaaagtttggttaatgtatcaggttcgggagaattgtgataaaatattctgagatggtcagaaaaccctctctgggggaggtggcattgaatagagctatgaatgacagtctcatgtagaagaaccccctcattctctcctgttcaccttcacgttactctgctttctttttcttctcagcactcatttctccgagatactgcaatacagactgatgtatgaattctcactgcacccccagtattagaatggaagctccatgagggaaaagacattgccttgttcactgcggattccaggtacctaaaccaattcctgacacaaagcagtggttcagtaaatatttgcgaataagcaaataaatgaatggatcatgtaaccaggacactgaccaactctctggcttgcacaacgctaagaagagacttaaagctgatggttaaatcttcttgtgtctgctcatcaccaaaaggacacctcttgtgtccagtgtctggagggaaaaattcaaattcaaatgcggaacctgcttgcaaacatagcattgtctgtgatgtggtcctgtggagtcaatcaaaagtcctgttcagacagctttttgctgtgttcatcctataaaatttcagactgaagcctgactgaaaaaaaaatgcttaagagatgttggagtcaacaagatgttgaatacctcatggcagtggtgaacttgctgtaagcctatgagcagaagttcaatccaaggatggatgcacacctattaagaatgccttggggctcagtgcggtggctcacacctgtaatcccagcgttttggaggccaaggtgggtggatctgaggtcagaagttcaagaacagtctggccaacatggcaaaaccctgtctctactaaaaatacaaaaagtagccgggcgtgatggcgggcacctgtaatcccagctactccagaggctgaggcttgagcctgggaagcagaggttgcagtgagccaagatcatgccactgcattccagcctgggcaacacagtgagtctctgtctcaaacaaacacacacgaaaaagagtgccttggaaagaactccaaaatgaaaatgagtgagaggtcagaaattagaacctaaggttccttatgactttgacatgttacaatctgtggtaggcagaataatggccccatcaaaatgttcacaccctaagcctggtcctgggattctgttaactcacatgacaaaagggactttgcaggtgtgattaaaatgtaaatccttgaaatgggagtttgccctggattatccaagagggccccaaattactacttaaattctttaaaaaaaaaaaaaagactcttcctggctttgatcagagtgaaaaatatgaagtgtcagagtgatgcgacattgtcagctttaaagatggacaaaagggccatgagtcaaagcacaagggtggcccctagaagctggaaaacgcaaggaaatgaattctgtacttgagcctctgatgtggtttagctgcgtccccacccaaatcttgaattgtagctcccataatttccacgtgtcatgggagggacccagtggagggtaattgaatcatgggggcaggtctttcccatgttgttctcctgatagcatataagtctcaggagatctgatggttttataaagggcagttcccctgcacatgctttctctcttgcctgccgccatgtaagatgtccctttcctcttccttcatcttccgccatgattgtgtggcctccccagccatgtggaactgtgagtccattaaacctctttcctctgtaaactacccagtcttggatatgtctttattagcagcgtgagaacagactagtacagcctccaaatggaacacagccctactggcagtcttagtccagtggtacctgtgccagatttcaaccaataaaactgcaagatgataaacttgtattgtttaagccactgagtttgtgggaacttgttacagcagcagtcgaaaactaatacacagtcttatgatttcttgtcccaaacaaggcaacattgtttatcagaaaattcctgatcccaaggttattccacttttgacctccagcatgataaaaatgagtgccatgaaggctggtcttaccctaagctggcaaagtaactgaagagaccagaagagaacatgtcaagttttagaaggggcattctgacccaagggagttcagtattcaatttaaatcctagaaagtatgttcttccatagaattaaattttaaaatttaatttaaatttacaaatgaaatttttcagagcaagaagccaaattgggccaccctttttcctcctttttagattggtgagattcaagtgactcccctgcgttcacagcccacacagccacatgtgttgcttaagataagaagatggaaacatcatatctgaggtggggactaggctggaggaataagcttgcaggaaaagcccattaattcctctgcagaaagctgtccttctatatttcttgaatcaggacaacagaataattccaccttcagactttgaggaaggcaatactataaaaatccatcaatttccaggccatatttgtatgggaaacttatttttgtcccaactcccatgcaacaggcctcagcctgtccattttggaaccacagcaaatattcaaacatgttgaattggaaaaggaataattgtcctaccttgtaactcactatgatttaacgtataaatgtaatatccttatattatttaatatcatctgcatgtcttccatgttgggaaacccaaggctacttcatcaaacctcctgcagctttctcagactgggacccaaattgaacttctcctattcaagatctccagcttctccccattactcaccctcagtcttcttcctagcaaaatggcctgagtgtacacacataggggctggggaaaaatagaatccaggcccagatccagtctgaggaagtccacctaacggtaatttccacatccccaaaatgtatcatcggaatagacatccttggaacttagcagatctccagagtggctccttggacctttgggcaagaaccatcatggtgcagaaggtcaagtggtagtctctcaagttgttcctgcaccatccaacatagaaaatacgcatatgatggaagggtggtaggttccatcataccgcattaattcaccagtctgattcctacaaaaacaaggtagatcatgaagggtgacagtagacaacctcggtgagatgcatgccctccagagggtggcagataagccctaagaaatttcagagacccaccaagtcaatgaagtttttgaggatccaatgatcaaagacataccagggacccggtggggtggttcacgcctgtaatcccagcaatttgggaggccaaagagggcagatcatttgaggccagaagtttgagaccagcctgaccaacatggtgaaacaccaaccatctctacaaaaaaaagaaaaaatagccaggtgtgacatagcctgtagtcccaactagtcaagaggctgaggcatgagaatcacttgaacctggagctggaggttgcagtaagccaagatcatgccagtgcactccagcctgggtgatagaaagagattctgtctccaaaaaaaaaaaaaaagtacataccagaacatcccatctgtagggaaggacacctcacatttcacactgcatctcacatttcactttgtcagctacacctctgtgggttctggaagcagctatcccacatttcagaatattgctgctatccatgtactgagtgacaggagtgtcttccattgaaaggggcaccaatcaggagaggtctctgcaacttgaccaagacctggtgaattcctcatgacccagcagacacagggtcactgaggtggaaaacgactatccagaatttatgcagtaagaaagtatgcaccatatgcaaataaacaaaacaacaacaactcatggtttacttgtgggccctggtagagacagattttccgcccacggaatgcctagttaccacccagttaccaaccagtaggagctttccatcatgaactgggttttgtcagagccaccaagttataaggtcaggtagatccagaacttatccattgtaatatggaagaattttatctagaattggcatgagtaggaccacagggcacaggtaggctgcatgagctggtagcccagacccctatgacacccactactgatccagcagcacctccttcctcagctaacacctgcggaaccctggtgacccctctaagcagctggtggagaaagaaaaaggctaatcttggttcttagctcagtgtgtgaatacaagctgcaaacagacccctgctgtgatatacagtcccacagagtcatggctttgaaagacagtagttagggaaaaattcttccccatagccgaccttcaggtggtgaatctggtaatttactctgtatggaaaaataagtgggctgacataagaatacatgtagagtcatgggtagtagcaaatggcttggctggttggtcaagagccctggaaaaggaacagctggaagactgaagacaaagagacctgggaaagagaggattatggatgggtctatgagaaggcacaagtgggatgatccttgtattacacaataatgccattagggagcagtcatcatggaagaagcagtaaacaatcaagtagaaagaatgactcggcccgttgatatgggactaatttctgtcattggtcattgggcttgcacaatggccacatgaatgcagcaaagacctgatagcacaaacattatgcatgggcccagtagcatgaacccctattccctaagacttatctagttcctagcaccaccaaatatccagcttgccagccacagcgaccaatgtgttaatccctaatgtgacttcataccaaaagaaggctaaccatccacttgggggcaacttgattacactggatcccttccatcttggaaaaggtagggattcaaattgataggaattcacatactctggatttaagtttgcctttcctggccacaagtctttagctagcactactatccaagagtttacaccaatactagatcccacacaatgttgcattgtagttagggaagatgtaagagttgaaatatgaccatgagagtggaaatatgaccacgatagagccacactggctctatcacttatcccaacaaaaagaaaactgccaactcggtagagcaatagaatggccctttgaagattcagctcgagcaccaacttggggatgatatcctggaagaataggacatccttctccagaactcagtgtaaactccaaaacaatgaaaattgtatgtttgtgcatccccaacaggtggaatacatgaggtcaggatccaaagggtagaagcaggagcggccccgctttccatccttcccactgatccatttacagaagtagtgcttagcatcctggtaacgccaggtgctgtgcatctagaggttctgagtcctggacaaggcactcttccaccagataacttggcaagagtcccattatatttttagctacagttgtcatctgttcacttaggattcttatgctgagaatctagcaagaaaggaaaggaggagatagagttgttgttacatgatggaggcagccagctgatccactagggtaccctttgtcactggggccctatcgtgaaaacagaacgaatgcaacagccatgtcgagaagggcatggtgtccagagcaccatacactttagagaggagggcttggtcactgcaccagctgagcagctcagaccaatagaagtgtcagccaaggataagaagcaaataatgacataagagtatatagagaatcgtggggagtagcaaatggcctggcactacagaaagcagagatgatgagtaatagatgtgacccaaagaccagctgcaggggtgggattgtggtttgtcccaatgacactcctcttataagtctcccctgaagaaaagaaacaaccaagatcctggaagagctgcttataaaatttattatacgaaacaagtagttctacataatgcagggggcagactgtagtgttctctgtgtgccactaattccagctcctgagagtcttggtggctggcagctcttaactgagttccctcttgaaaattgtccttagctgaagagaacagccttattcaagattacatctcctccccaggggcagccaccatccaatgactggttgatgcactggggatctggtggtttaaagccccaaactccatggcaggacatttctgcagagccatgctagctccagcatgtaccatagcatttgttgaggcctcttctgcaactttatgatggtgcaacttctccttatgcccagtcttgcttttctgactcttcacagctgttgctcctaaaagcatcccccagggaacactctacacaaatttctgaggctcggcatctgatttcttggaaacctgacttaggataaatacttcttttaaaagatggatctgtttgtgttgccatatgtacacacacacacacacacacacacacacacattccaaaacccttcctgtgttctgttcctctgaggacaaagaccaaatgtcttaccctggaccttggagtcctgtttggtctggcatccaccaatatatctctgcagctcctctccccacaccacttccttccatgctctctttcccaccttgcactggccttctttgagttgcctgggtatgacaggctttctcctgccccggagcctttgaacattctgattcttctgtgtagaaagacctcgtaatctctattctttatccaaccttcagaccaaatgtcttcttcagagaagcctttgatcttccccagatttgatcagattctctgttatgtggactcataacactgtgtactctcattcatagcacttacgagtttgaattatttgtttgtgccactggtggattaatgtctattttgctcaccattatagttctagcatttgtaccatgccccactcctagctgacaataaatagctgttaaattagtgactaagatgttaattctcctaacccagacttaaacccctcaacacaaaaatacagcctttttcaccatactctgtcttttgtgggtattctccttgcctagtgacttaaaaggtagttgcaggggctaggacacagcaggacctcaatgaaccagccctgagtttacatcttaggtaattaacgcatctatgttttctcctgttagactgtgagctccttgagagaaggcgttctctcttgcctaaacctcaagccaggagctcagcgaatgtttatggctttaaatcttcaggaagtatgaatgtaaacatctggctattttgaagtgtgtaggtggtttggtttttacttcttccagagagtttgcatcacacaggcacacaaattgctaacatagggtgttagaggtcctagggtgccaatcggctcatatttactaatcatagtctgtgctccataggaccaaggaaggagtagctctgagggaagtgtgcccctggtattcgccactgtgctaaattcacaagtgtgccagagaggtctcagagcaggaaagctgtccagtcacacaaatgccgcaatgcactctagtatagggctgacaagctcaaatgcttcttaggctgaaggtgaacaagtgagggaggatttcgcccaaagcaggcagcagggacttcacactggctagatgctgccatgcaagataggagccctgtgttgctagatattctgattttttcaagagaatccagaactggattgctgtggaacttgcccagctttatatttgtcctcaagaaagaaagaaagaaagagagagagagagagagagagaaagaaagaaagaaagaaagaaagaaagaaagaaagaaagaaagaaagaaggaaagaaagaaagcaacaaaagacattgtgctttccaaacaaaatacacccaaaccagagccaagttcatgggaagctttgggttgaaagtcagaatatgcagtctcttcaaactcactgcaagaccaggcacgtccctagaaaaggtgtgcctcagtttccccatctgtcaactgagtcatttgggccagatattccagccgtcacattgtgggtatccttctggatgtgaggtagaaatcctgctccctgcctggcaattctctcaccccaaaacaaatcattttcatttacaatttgaagccagtgactagaaaggtattttgccaggatttccatttctttcaagggctaattacaaaagacaggggggaaagctctcaccatgctctctttcacatctcattacatttattcagctttattactaatgctttgttcatataattttcaccctgggatctacacttttgtgcagttaccccaagtcagggaacccgccttaactccagaggtcttcatcacctcctctggtgttcttaggattttaaagtgacaatctttgtgttcagaaaagctttctgagcagagtgtttttcaagagcatgctgtcctgcccaaggatgaggctgccatctaaggtggtccaagggacgcctggggacttgctcccaccatcaccaagtccctgtctcaatccgggatgcacagacgctcctggggtggcctgcgttttggaggctgcccaggaggagccggaggaaatagatggcttccagagtcatcctaccccgaatctggactagaagctatcgtgttctcctgaaactgtccagccccttccacagatcgtcacacaccttctccagcacaccacccccggccacctccacgtgttagtgggcaaagccaaggctctgattttggaagctcgtctcggattgcttcacatggattcaggaaacaagtcccaaaagaagccaaaaggaaaactacaggaaatgtgcacaccactcaccatgaaataccaacccaaaggacaaactcggtaatcccaccaatgttgtcccaaacccgtgatggctagcagccgacaaatacccgcagacctcaatccatttttattgtattcaggcctcagtgttgtatttcctgcctccccttagcaccacacatacagtgtacttgaaaacaaaaatctataatattgatcccgcaatgtcaccacaattattcttttgaaacagccattgaaaacaaattacatctgcactgccttttcatccgcccgctgcgagtgagcaatgctcactgcggtctccagcactgtggcgttggcactgtgtcaccgccgacaggacagcccagggaaaggtggctggggggggggggttcagaatgaaaaccagagcgaagggccgatttaggagggcacagggtctctgcctggccaggcagctcaggaggggtctggatccaggatggctgcaaactcggtcaatctgagaaattctaggtcttcatatagggctactgtcagggcacaaggactccccagtagaccaaatgcggtagttgggatgattaaatcaacaaagatttagccaaggcctttcggatactcgctttaaaatctaatgacagtaagtgttaattgaagcaacatggtcgtcatctgagagctcgtaattctaccgacaaattaaacctccttaaatagaccattgagctcaaagcaggagagatgcccatggtcctagctgtctgccacccccaattccaactgacttcaaggtgaccctcctgaagaaggccatgttgtccttttcttccagcaagctgcatctccagagcatccagaggtagcagagacctcaccagtcgcctgccatcctgccacagagctgaggattggcacaaatgtggtgccccagaccccagcaagatccctgatcccagctgtaacacaccagccagttgccctgagaatgtctgtggttgggggcctgcttgtttgttttagattgtcatacttggaaaaattctctctgtgcaataattaaattccatgccaccgagtggtgggcaaagggaaattcttttgttaaggtttgaccacacaagtcacagcggtggctctagcagccgggaagtgataactttggagcattaaaaaaaccaatagccttgttgacatggacatgggaacctaacccctgaagcctcctggtatgacgcattgattttcctgtccgtgtacagttctaaagccatccattctgtatggtcaggactcaaagggccagagagagggaaaaaatctgttcttgccgctgtacctccaggcaaagttgagaaataaattctacattttgagagatgatttgttcaagccatgtttaagagaatatgattgcattaaaaaagggaaaaaatattttgttaccctgacccccgtaacctgtagccactgatcctcatgcaaaatctagatgccatggacagcacagtgtagagggaggatggtggtggaagggctgaagagggcgtcaggaactggggtgctttttttataattctccaaataatatcaccaagctgccggataatttctcagataatcctagcatgtccacctgtcattgctccgaccctctgctactgttgttttgcaagaatgcttctcctttttgttcaagggtcccttgagaaattgccacattccctgcttgctttccaagcctctcttttttgcagctaaaacaggccaggcagctcactcttcagggtctgcctgagaggcaccccgacctgctgtccccatgccatggcagccagacaggacaaggctccccagagagccttccagcccctcctcccttcttctgtgcaccatggagtcctcattcaacatgtctctatgtgaccaaaacccctccctgttctcagtagtgatggggagagggatgctgggtgaaggagagagagagagcccaggctatggggaaatttgctgagacaccgcaggggattccatgtgcggttggcttcgcatgttcagtactttttgagtgtttagctattttagttccaaataaagaaaccttcagtgccggtcaggaggtagagctcacagaagtagaagactactgtttgagctgcaaatttgcagtgtcgttctgcaaagtattacatacatcatttcctggtgcagaggaatattgagctatttcagtgaagccaaaaaggaaagaccaaaatcatgcaattttcctgacctagacagaactacggacggaatacagaaatagcaaatgctaaaatgaatgttcttacaagatctgtctatataaacatagaatccacatatcccaagtgtatgcaatgtgaactcaacatcagcatgcatgcacactagttaaagtcataaacccagtcacacaaaacattcctaccagatgattccatcttgccagacctataggagtattcctaaattaggttggtgtgaatgtgtttgtatatttattattaaaatacttactgttctgccttttgaagtagatggacaaatgatttaggagtgtaaatagactagaaacaaaattaatgcaaataatgtgttgatttttttttagcttgattagccaagccaatggaaaattctagaaaacgtatacaattattttaactgtcacaggctggcaattgtaattgacatgatttgtacgagatgcagtgtaataactgaatatattaaaaaaaaatctcatgccttgattaccaggagaacattactagtgccacaatattattaacaacacaattatcgtggcatccccaggatacgctcttagcacttcaatgcattagtgaacctttgctaacgaagaaaaaattaaagtacagcaaatttcaaagcaccagttgtacccaatatcattaaaaatttataaaacttcccctgaacatgacaagtgtttggtttaaatgaagatcagccacaaggagaaagcagaaatcttgttattctttgtctcctttcttagcctccctctctccctctctcttttccccaaacctcccccaaccagcaccacctcaatccagctgaaatatgtaaccattacagagtgacagcttgacacacaatgacccgtcagaacattcatctcgcaatgttttattttagtgaggagccaaactgcagaaaaaataagcaagttgtttcaaggcttggaaggagatcaaacatttctggcatccccacttaccagacctttgatttacaatggacttgtcagagcccgattagacagtgtgtgcttaaaaacctacagaggctcctccatgccccagcccaccaccatttcccccaccaacagcatgcctttgttccccggaaccagcaaggcaggctaaacagagactttgcacccttgcaagaggaccagggaccacgtaaaagccaaataggctgcaattaaattcttcttgccaaggtgaaaaaagaaagagagggtcagagatgtgggggagacaggcacagagagaggcaagagaaaggagagaaaaagagaggatgagaggagagaaaagggatgaagggagaggagaaggtacaagctgagttccttctgctagtctctttacctctccttccaagtcaaaagttatcatcttccccaaaaaaaaaaaaaaaaataccctgccattcctaccaccagtgagctttctcaaccttattcaaacgagaacactcagcttacaaaaaaaatgaattggaccaaaagtgcaggtgtgtaaaatatgttcacggtattacgatttttgctagtaattacaactatgaaaatggctggaaatatattgtttcaatttgtatggagaacaattgcagggagagagagagcagtgtgatctgtgcctggcattggaatgtataattccttaaccctatatggcagcatggggcttgctggagcaaattatgaatacatgtgtttggagagtctgaatagtaaatttgggttttgcacatccataacaatgcaatctgacaagtgtgatttatggaatattaagttaatacagtattatgaaattagcttaatgtactaaagctgtaattttaaagtgaaaaacaatgcaaccagatgtaaacaatatcaacattagcattttgtgaaagctgaaaccaactcactcaaaatgcgtctgtagagtcatggagttacctcgcccaaccaggcccaagttgttgaaagtttcagacaccagaataaaattccctactcagtaggtacagctgctttctctccacccaaagcctgctgtgcccgctgcaatattattaaccacaccacccccaccccttgggggaaatcatcagaaattattctgagctcttcagactagaggaactggtgataactctgcaggctgagctcaaagggcctccctcctggcactgcctgcctcacccacaataaccctggagttgaactctgaggagaaagagcttggtgccagatgcaatcccaggaactcagggtttcaagcctgcaatgaaaggaactccaaggccaagcaaaccgtgtcgatgtaaaacagcaaatctagcagcgtagtcctaagactcctcagaggggaggcctaccaaagccacagagacttatgacataaaagagaactagaaacctttgggctacatcaggataagccatcctgaagcgcagtgtggctgcgtgcgggccagcccaagatgacagaaaccggtgagcatgcacacagtgggcttcccctgggctctgctatcaaggactacaggccaaggggatggatttgggccagatgaaggttccccactgtcccctaaccctctccccaatcccatttcacctctcatctcccaaggacagaggatttattggaacagtgcctccaccgcagacagatgtctgaaactccaggacagaagggaatgttatggtgcttgaacagtgtgaagaacccattagaaaatatttccttggctgtctttgctttcaatcgagattgctagaaatgtcatagatttaaatgagtggatatgtctggaacccaaacatggccacccttgggcgccattttccttccctgacccaagcatgctaccccttggagagcaacagggttgtaacccaaacacagatctccgcagatccttgaggaaataagattaaagcactgttcctgggttccactggacataagggcctggtcatcacagtttactcagattcccaagacttaggattaaataaagacctctaggaacagagaggcaaaaccatacatattggttcctgccatattgttgaatattaagcttatttgatgaaagacaggattcctgtctgggaccaaaaccagattcatttctctaggaagatatctcatatgaaataccttatggacttccttggcaaaggtcagaccccaaatcccatgctgtggtgacctccacttcagagaaggcccagtgcatatacacactgataaacactgatgttcgagtaagtatatccacattagatttttacagcattttctttttaagattccctgtgtatggcttaatgtggtaatcaggattatttcatttatctagcatgtcacagtgccttcctatacccatggtaaaaataagagcattctatttaaaataaaggaaaagtatatgtcaaagttagagatgaaacagttgccggagtccacactggagaaaatcaattcacaaatcttgcagcgaggttctgtgcctctcctgccttgcaaaggcgcccggctgttttctgctgtttattgggttttgtttttaagatgccctgcatttataacaggagctagagaaccgagagctgaaagccaatactaatgttttaattccatcaagtatgtttcaattcctattttgcattttgcattaggcacccggactcagtcaatacttcacagcaccgtggcttgcagccgggcacaggggcttcacctaagctgacaaatgattatgcttcacaacgtgaggataaacagggcttagagtcagaagcctgctcattgctctttcctgctacaaagaacaaatacattgtctagtcacaatatgtttatttaaagagaccaccgtgtaagttgcttcttcatgtgacttccttttcaggaagccacctttcttcctccaaaattattaatctccaaaaataacataatcctccatgggacagtgagatgttctacctcagtgttacaacccaggaaatggagacatagatggttagtgtcctaccacctctgtgagtcctcactccagtccgaggagttagtcaactctctcttttctcagctgaagaatgacactgtgggcagctttcttgattctgaaagataaagatgctacaaacttaaaaaaataaaataaaataagtatacgtctgctccaagctcaaattgctatttttggtcccctccttaaaccaggaaatgttcggtatcttagcctctatttttttctgcatttataaatccaaatattttaactagaaaaaaggggttgggtagtaacaaactctgacacaaagggtcgtcattaaaggtcctctaaattcaaactaatataacttttaaaaaattacacaaataaactcaataaaaactatacacaatacacaaataaaaagtgtggggatgggggtgtgtgtgtgcacgggggcgtgcatgaaacagatgggcttctcgaattctctttattctaataagacttatgaaataaaatcagaatagatgctttatctctaaaaagcagttttttgataaacctcaaaatcagtcctcatgttcctacttgcgtcacacagtatcagaccagaccttgctaatttctctggaggagtcaatgattcaactccaggactgacagttgtataagtagaatctttctgaaaatctgcctctcaattgcagtcacaggagtaaactggtttacttgttctaagaacagtggagcaacatctgtagctcagaggtgagaagcgatggaaagaaaaataccctaagatgggctaaatgtccccagacccgaaccttaaggcctttctctcccggcaggtacatggccccactctcgccccacttagcaaattatgtataaatgaattaccttcctgggctggttccctctgaattactccttggcttctgagtggttttccatcaggacgaaccttttcctctcccttatgcaccagcaaacatactgatacaatttaaaggtcatgttcttttcaaactgacagagccctccaaagttttgacgagaggccctccaaacctcacaccctacaggcggaaaggaattaagtaaagcatcacttgctggaggctcaatcatgtgaaatgattagaaaacgcatccatggagaagggggcttctcgaggtgactggctgctcatcccgaaaggagatgtcacaccgcgaggcagagtccctgccactgggggtaccccaggagggtcaatgaagatataattactttcccacaagaagtctcttcttttcccagtccccagtggatgtcacttaattagcctcgccttttttatttgatgatagtccacctttccccccacaccccaagactgaattaatactatcatttcttaggcttagaaggacttttacttgataactacggaagcaccgagaggatggattctgcataaatgtgcgttgtgtgtagacattgacatgtttatttacaggtgtatttgtattaccaggaggatagacggttcgtggtgtctttttctctttcttttttctattttttttctgtctttgggacaaaaagaggatgactgaaatggcaccatgttgttgatggcatgagcagatgctgccttctgggaatccaaccatggcactggacattcttctgatatcattattattattattatttgacatttttgctttgattactttgttcatcttaaaactgccaaggttcacctgagatgtgacacttgcttgaaggtccgagaatcaccagatgctctgtcttaaactgtgtacatgcaatgacattacctgtcacagaaaagggaaccttgatgaaaaccccagacagaaatgcaatgggtggctcacacgccccctaaccctgctgcagagttccaggcaaggccctttgtctcgggttctccttcctgcctggcttctcctgattgatctgagcatccctcctcaagagaagccctctgtaactctaggatttatctttgggctgaaaaaaatgatgctacctcaaaacacttatacaccaagaactgaaataatttagcccatggaaaacaaaataaaatccttgttttgtcatgatttcacatgcatccttaaagtcagcccagggcttgttaagtttttactggaatgactttgctttgaaacttccctcctgctttaattgacggatgcacacaagaccacagccttggttggccctgtcatggaaagctggggctgtgatcctggaattcagtcatcaagtagttttttggcattgttcttctgttgacttcgcctctccctgtatcacaccagttgtctttccaaaaggaagtgtccctttccttccctctgcaaaagacacaagctgctctcacccacttcctccagccatcggcacctctgttttcagaccagccctcatgaccccagttagaggtgcacagctgttcctgccagcccttcctcccagcctccttcctacagatgccaccatgactgtcacacctttaaggtctgtgtgtcctgtgaatacaggtctaacttgcgggacacagagaggactttgttgagcaggtggtccttaagttcaaaatctgaattaaggcatgtacagcagcacagtcatgggaaccttgttcagaaaccataaaaaatccacggatgttctcgtggagaccacacttcatgctgttaaaacttgaccatccaaatatttcctatcacacctttgcgtggtcttattgtgtgagtggaggagtgggggcaaggcagtcaattaaatgtggatcaaataatcaatcaccattgactgggcaccttttgttgcccagcactctagctattggctggaaatgctaaaataagatcctgtcccactctcaaggagttctccatgtgaccaatagagagccacctaaacaaaccattaattgagtgctcctcctgaacctgccacagcttaatagaaattgacaaggaccccatgagaatctcgaggaaaagcagcaaagattttggcccctctattttaactgggtctcttttttaagtgactgctgcactgagtcactaattcagtagaacgctgtgacaaatgctaggaccaacgcaatccagacctagacctctatctgctttcctcctagaaagaggagtttcaccttaaagcaggagggaaggtgtttcacacaagtgggctctttgcaaacttgctaaatcagtcttcctccatttctggaggaaaaaatctgcacggctgctcacaaatgccagaaagggaaagaatccaagaccttgaaatagctgaggctctttccttcatttaaaacttttgttcctggaagaagttgaaggatgttttataaatgttttaaatgcatcgttcaaaggcaaagctccttccttctctggggaggtgacccttctgttctctctgctgatgtcaggcctgagctgtgacctagagggacagcagggctggtgacgtctttttacctccacacccacgaaatggcgctctgtcaactgggggaagaggaacagggctgtggttgtttaaggggtcttaagaagacaaacccaggccacagagtttctacgttttaaacctttcactgcacttttccttattgtccacatctgccttttaaaatacttttcatggaaattttatctagctgttttcatgacaggcaaacccaccgtgcaacagccaaatctgaactaagcatttgaggaaaaacgttctcagttgtgtcaacggagaaatgatgaaatgaacaccagatcatgttagtacagcccgtctgtctgaccgacactgacagccccatctcttgaacacttaatgtgtacaaggcctgtttaagccaagaggaaagaactcacaggggtagacccggccttgaaaggggtttcattgagtggggctacactggggatgtgtctgtaccttggacaacgcttggctgtggctctgacacccagcatgtttcctgtgaccaagcaaagtgctaggggctgtttatttcacctgcatgcagatagcccgcccggacaccaccccaaaaggatgagcacaccctgagaccagccatgtctagaggccaacaggaaagggtcatcagaaacccactgttctggtgcttcaggataaatcttgcctatttcttcaaagatagagcatcatcgaactggatgatattttcttctcctttgcaaaagcaataaaagctgccggtctgggctgtgtatcctgcctgtgctgctaacaagacacattcctttttgttcatggcgagtcatgtaagtttctgtcttatgtcacaatttctgacaagtgcttgagcacaaaaacagtatcttggcaccaagaaaatgaccatcacttaaaaagatgaaactcccaaggacaccaaaagggtaagatttcatgggagatatgcaataggaaagccagcccctcccatgtccagaagaccatccctacaaatcatgtcagaatcattctgctcttatcaaacttcaaggcagccactgctgcaaaacttccctggttcaaaccaaccacttggcccagagttgatgtttaacacttctacacatctcatggttagcttattgggaaagcctgacttggtacagccctgttcttttttccactttttaattattctaattccttgtttttcttctaggtcccttagaagactgatttctcagccaagcatggtggctcatgcctgtaatcccagcacttttgggaggctgaggtgggtggatcatctgaggtcaggagttcgagaccagcctggccaatatggtgaaatcctgtctctactaaaaatacaaaaaattagccaggtgcgctggcacgctcctgtcatcccagctactggggaggctgaggcaggagaatcgcttgagtccgggaggtggaggttacagtgagccaagatcacaccattgtactccagcctggccaacaagagcaaaactccgtctcaaaaaaaaaagaaaagaaaagaaaactgatttctcagttcaggctatctcttctctctgtttgtaacacaaaagacttatgcctctgaaggacgttgtagagagaatattgcgatgggaaacatacaactttgaatttcattacatcacaaacttccttctcaaaaatataacaccagttagtttaataaaacatggcatctacggacatacttatcatgcagaggtgcaataagaaacaatcatattaactgaaaaccatggcttatttatgtattaaagtatattatgtacatctgcacccaaggcctctccgactcattgccagatggaaatggggaacatggtgccagccttcaccctacactgggaagttcttttccctgggcgaatgtatcccttctgcctacctgctcacattccaggactcctgccagtttacctacacccatctggacttagtgacaacatgaaatccaggctggggtatagcagagccctccctgctctgttcctggcctttgcattttcgagggtgctgggaacttatcagtctaaaatctatgatgattttatcatagtcactagaaggatccaagaggaagtgaaagctgaaaggaaagcacaagtaaaattctcactccaacacctgacccagaaagcctttgggttttgaggggtgagcatgagggggttgctggttcacctaagaccctctccattcaccatcacgtccctcggtctcccccgatggagctgtttctgagtcttacaaggcaaatattaatttggaagtcaaggtcctatttgcaaaagaacagacagacattctgagatcaagttcagacttaatatactgagtcttggtggtgttgtctgctgacaggatacactgtctttaatatctctgcttaaaatattaccaacaggctgggcatggagacgtggagtttgagaccagccctgagcaacatggggaaaccccacctttaccataaattcaaaaaaaaaaatttggacaggcatggtggcatgcacctgtagtcccagctactcgggaggctgagatgggaggatcacttgagcctgagaggttgaggctacaatgagccaagattgtgccaatgcagtccagcctgagtgacagagtgagaccctatctcgaatatatatatatatatatatatatatatatattccaacaacttaaataaataagacctagtatttgctagcacaacagggtgacaatagtaaaaaataattatttgtttaaaaataactaagagtataatctaactgtctgaaacacaaaggataaatacttgaggggatagataccatgtttacccggatgtattacacatagcatgcctgtatcaaaatatttcatgtaccccataaatacatacacatactatgtatccacaaaaattaaaaactgaaaaaaattaaattaaaaaaaattaccaacaatcagattaggtcatcttctgctctggctgagctatacccaagatagataaaacttcaaggcttcagagattcaggaagtgcaggcagctttgtggagaggcagggccgtgtcacccaaccatgcctactaatcaagagccctgactcccaccagcccatcctccctgttccactgcaacacctaactcagaagacatggcccactaaactgggcaaaacctaggtgcacatctgcacccaggcctctcccacccgtcgccagatgaacacagggcacacggagctggtcttcaccctacactgggaagttctgtatccctggaggaatacatccctcctgccttcctgctcacgttccaggacccctgccagtttacacacacccagctggatgcagtgatgacagaaaattcaggctgggctgtggcagagccctcctactctgttcctgcaggggaacatggcatagacccccacgacgagcagagccagcttccagcctgcacagactccaagccttttataaaatcaaaatgagcctcccttaaataagggaagcaagggaggggatttcagctcttcctttcccagagggctggagccgatggcctcgatgacagcctaggcattcagttggcttcgcctggaggaagagggaggcaaacgtgcctgaatgattctccccaggaaagggagagagtaggacaacttggggaaaaaacgttcctgcagggctgcaaaaatcagggagaggcggcagggcaaggagacaggcgtatgtatgtctgtgtctttcagctaggcagctcaatctcaggttattttatttgacaaataaaactaaactgcatatttatggactaatgatgtgagatattgctcttttattcgtatccactgctgtttaaagaccaactgtaaatattcctgggactttttgcaagttggtgtgacttaggtaggcagcccagagcacaaccttgcagccccattgacaatagcggcactgcctcaaggtcaaggtcaagatcaggacgtcacctcctttagcaaagtcagctactcattgggagcatttcctctcaaaagccacagattcacgtatcctttcagcaacactcatgcctggctctgtgctggcctggggctttcagagccatctggaggatgctgggccctagtcctgctggtcaaacaccatgaggcgtcagtgttgggggcaggagatgatggagtgtgatgaccctacccccagaacggggataactccccactcctctgtccttcgccatgggccagtgagaagccatcatgcagaagggcagtttgttggttgaaggcatacagtggcaaacataatgtgttctctgtcatttgatttaaccactcctgccatcaaaaataggacagggagaaggaagccaggtcaccttgtctttggaggaaagaaagagttctgggaaatagtaagacaagttacagggagggtctccatgggtccatgcatcttgcccagaggacagtgggctggtgggtgggagtgggcagaggagaaggccgaccctcaaacccagcagagtcaaggcagctactaggagagcacagtgttctcagacttcaagggttgctaaaggtgctgcctcccagctctctgcaggcctgggtggtcagagcaggctgtgtgctcagaacaggtagggccagcaaaataaatgctgcatggttgacccccgtgccacctttatgggctggggctgacactggggggtccctactgaggacaagctcagtttaggggaaatcccagccagacaaccacctggtaaataggaatagcccttatgtgggcttagagaagacacagatgagcatcattcaaatggaacctctcccctgctgaaatcccaccaaggctaagggcctgctcagggagtcaggcatatgttggtggggacagagggcttcatacagcattaatctgtaagaagctgccttcacagcagctcctgctcaagcattaattcatttttacttcccgtggtgataaagacacacctcaccattggcttttctaatgacagatgtcgtcccacggccctgctgtggtcctcaaagatttggtgcccacagccagggatattgctcccgcctctagccttctccctttgctcaccagtctgagtcatctcttacccagctgctcacccaaaactaaaaataactgggcaaatgcctaaaactgctcccaccctaacccagggctcctccaaagatctagaagaaaggtaggaagcccagctttggcctccatctccagcctgctgctggcttagaggaagatgcctgagtacattccatgcaccaagtactgaggggctacagagatggacatagcatggcctcggaactcagaaacaccacgcaaagccacagaagtgctgcaaagagggtgttttgtccaacagagtcacgtgggagagaaatggatcctgccagggaaactgagaaggcttcatgcaagaggaggtatttcagaggagcaaaacgtcagtagacaaagaacaaggagggtttctcagggaggggagctgtgcaagccaagctgcaggcacagaaggaagctgcagtctgtgaactctccatgagagactggggtgagaataaaatccagtgcagctccaggtggaagaccctgcctggcccagctctgctggcctcccagactcattttcaaccatgggcctctgtgtcctctaagcttctctcaagcttcctcctctcaccttagggcctttgcagattctcccactctcagcagtcctcccactccgggccttcccttggtcggctcccccggactttcaacattcaactcaaagacctcagtagagctgaccatcatgttcatctgagggattttcttcatagcacttcctgctctctgaaattatcttgtgtttgtttgcatggtcagcatcttccctaaagtatataacctccgtgaaagataccttgcctgttttgttcagaatcttcagaggctgggacaatgtccactcacaggaaaccctcagtggccatctaaatacctgatgagtgcatgagggcaggagggagtgaaggagggaaggaaggaatggctaacataaggtccgtcaaggggcagggagggaaaacagaaggaaaggcaaatgagcctctttgtggacttggtgctgggcactggaatttgtatctgcatggcctctctgggagtttgtaaaagcagtctgagaaactcagggaggtggaaactggccagggcaaagctgatgggctctgtgcagaaatcactgatcagccaggcatggtggttcacggctgtaatcccagcactttgagaggccaaggggggagggtcacttaaggtcaggcattaaagaccagcatggccaacatggcaaaacatcatctctactaaaaatacaaaaattagccaagtgtagtggcatgtgcctgtaatcccagctactcgagaggttgaggtaggagaatcacttgaacccgggaggtggaggttgcagtgagtcaagatcacggcactgcactccagcctgggcaatggagtgactccatctcaaaacaaaaagaagaaagaaaagaaaccactgataattttccactttgggatggggtaagccacagtagttgagacttcctgacctacacagagaggccactgagattctggagccgggcagttgatgaagttgaaaagaaatttgctctctgtgtcagtcgatttgcattgttataaaggaatacctgaggctgggtaatctataaagaaaagaggtttatttggcttatggttctgcaggctactcaagcacagcaccagcgtctgctcggcttcttctggggaggcctcaggaagttttcctagtggcagaaagcaagcggggagctggcgtgtcacgtagggagagagggagcaagacagcaaggaggagatgtcagtttctttaacaaccagatctcccatgaactcattactgcagggtgggcaccaagccattcatgaggaatccaccccccatgacccaaacaccctccaccaggccccacctccaacattggagatcacattctgacatgagatttggaggggggaaaaaacatccaagccatatcaacctcactccatcacaagtgcttgcaggatgctctacctagcattcctatgggagtcttctccaggcctccaggtgccagatccttctggaaaacaggctctggaaagaggctgtgttggcttcccagagcaggctgcagcacagcccagccacggcaccaaccccactgcacgtgggaagtgctagttcccagcgtgacccagctcagactcacagccccatcagaactggcacataccccaaatccatgtgagaacccagtgatagattccccagttcatatgagagcttccagtagactctggaaagtccgggccctccagagaagggtgatgtcaaggatgcagaggaggacacagggagagaagccacaggtctgtgttcaagctactgaggacccagtgggcaagagagaggttcccttgtgccttaggagtgagaatttccaggccacctgtggatgagttcacagcttacaggaatacctgttgggtaaagagtctgcaattactcacacttctcagccactctgagaaacttttaaccacaagacctttgagtttgagtttaaacactttcaagcttttttgcaatgttgggcaagacagaaccttccagtgacctactgtcttaatctgaaaatactgaggctgtcacccttttatgtctttggactgttgagagaatgaatgaggtcagtgtgcacctataccaggggctcagaaattcttgacccccagtttgtggtcattgagtactcatatcccttctcccgaatatcttttgtgcctctcttgcaatgtcctgtccgagaaaaacccagcgagcccttgtgtccaatggctgagtccagttgaacatcctcaagcaccctcatgacccacgctagctgaaagtcgaagccactccctgtgaccaccactcaccctctgccctctggccctggtcccctctgaccaccactgccccatgacttttttccttctctctctgcatttttaccctgatgaaattatttgcctatttcttcttcatcccagaagagtgggtgttggagctttgcaaagtttgcattataagaaaccaatattcggggccacagaacatcagaggtttggcccacatgacaacatagaaaattcccacccaccaggtttcctgcagctgctcccctcctgcaaggaatttgccaagggatgtcggctatagaaagagcattccagaaccacgatgatcaaagtttcattggacccaagggcacaaggtggagtgggaagggaaggtcctctgcagaactctttgtatttggaaagaagaaaccaccaggcaagactcccggcatcctcccagccagggagaggctgaggcttggggaagttgggtgtttccctgaggaagtaaaagatgaagcgtttgtgttttgtttgaattgataatgatgtcagtttcagttatgggctcattacaacagacttgggacgtattaacagctctttaattgaatttggaaataagaaggagggttttgaatggtcttataaatagtggatgtgccggcctctgcagcaaccgtcttcaacattaaacagggagagaggagacaggggatcccccaacgtcagccatttcttatcctccacagggtccccacatgcccactgtgagacaattgttatcattcctgagctgagcttgtgggtgctaaggaaggcattcggaccaggaagcccaaatttggacccagagagtaaaaacagggctggtgagatgtggagatgcaaccttttatcttctctttttttatttatttttattttattttattttattttagagatggagtttcactcttgttgcccaggctggagtgcaatggcacgatctcggatcaccgcaacctccgcctcccaggttcaagcaattctcctgcttcagcctcccaagtagctgggattacaggcacgtgccaccacacccggctaattttgtatttttagtacagatggggtttctccatgttgctcaggctggtctcgaactcccgacctcaggtgatccacctgccttggcctcccaaagtgctgggattacaggcgtgagccactgcacctagcctatcttctcttctaaatcagcaatgcaagataaactgctgactgtccagcccccagccccctcctataatctccacagggcccaaggcacacggtgatgggatggcctgctttcctatcagccaggggccctggccacctcctctaggaatcctgggtgcctgccccaggccctgagaaaggaaatctagacaatcctttgtagagtgaacaagaggatgacctaccacctttgggctttcccttttgccttttctgtttccctcaccctttcctcccttccacctgctttctccaccacacgctctcatatcaacccctatgcagcctcttccagaaaaatccatgttaattatccaggatacatccttctttatttactccatgactatataaccacatacaaatatgcatatttactcatacttgcatgcatacatatagacacacatatacatcacgtccatatgcattacctgtctgaggggaggggagagagttgacagattttgcaaataaaaacacaggacatccagttacgtttgaatttcagataaacaacacacagcttttaagtcatttctagattatttcttgtttatctgaaattcaaatgtattgagtgtcttctattttatctggcaaccccgggaagaaggtggctttatttttttgtaaaatctgatcacagtattcacacatgcactcttgagatcccatagctatctttccaggtcaacaggcagtgccctagtgcattctttttaatggatgcataatattccatgttgtggttattcctcaatttctggataatgcccactacgtttggttaactgtactgcagtgttgctcaccgtcaacaaaaggaacggaagacaatatggctggctctgtcatgcctccttaaattagctgtcatggcaaagtcagaccagaagtcacagcaagagaacacatcactcagaacagccagccccaggagagcctgtggctgcatcaagcaccctgagcggggaggagggatgacaaaaagaactgtgaaatgcccctttccaacaaggaacataacaatggaaacagagagatgcctctgactccaggctggaaatatgctcaaatgtagaaattcagaccaactcgtttgccaaaacccacaccagcataattattttgctcagctccccccaccccaccccaaactccttctttcatcagtcatatctttaacttcatccttgttgctgaaaacacaaaaataaaaaatacatagcagctctgttgacattacagcaacagcataagcctcattttaccaaccatttaactctctctaaggaccccgttcagagacacgggcacgttgatgggagctgtacaaaggtcagtgatttggaggctcttttcgacaatttgccaggattttggcatttgtaagcatccataggacagctctctagcaagctgaccttgacagcgaatgggataaataaaccttcaatttaccccctccagctctccgcgagctgggccagtccccacggagccttcacctgtccatatcgttcaactgcctgcaacttccaactgacgaacatccacagctccgcggcccagtgacaaacaccatctaacagataagccttctgaaaagtcaaagccaatactgcttccattgaaaatttaatgccagctccatctttgcccatcattcttccgactgttccatgtttcccaagaggcccttgaagctaaagcactgctctataacaggtaatgacgtagcatttaatgatactgtccaaagtgatcccggtctttgggaagtaatgtgcactcatgtaccagataagcaccgccaaacgtactgagccgccatatctttcacggccctgtcaccagatacaatgtgacacatccccggccatcctacctgctactcctccgaccccgccatcagacaaattgtgcgttttcagagcagagctccaaagcgttaagtgaattcaggcaaaggtaggatggtaacatagccttaattaagtattcacagcctctttaatacttcagtgctcttggattcgctactaaaatctgtgaattatacctcattgaaaaatgtccttaatcgactctgacatgttttattggaggcagaaaaaatgtttcagtatgatagataaggttaaaaatgttactactctgatcatttactctagtgccttgcaaaagaactccaaagccaaaaaccatttacatcattcatcggatgcaatggagaaaaaaagccttatctgacagcccattttagctgatgggacaaagtgcacattttcaattttctgacaaagttatgttgtttatgtagataagggtaaaaacaactgtaacatttctacagcatgccatgagggctggaaatgtggcttcaaatgtgaagtatctccaagccacacggagcgccacgcaaccaacaaaaagccactctttgggcatcagacgaaaacagtgcatggagcaccctccatctcaggagcagctgagaggagcagcagagggttttcaaacagccccagagctctgctgagatgtgtcacctgacaaccctataagtaccaaaagtttcatcccagctttagccccattaatttgcagtgggaaacgcagaaaccatcaattgagagaccttctacaggggtgtccaatcttttggcttcctgggccacactggaagaagaaaaattgtcttgggccatacataaaatacactaacactaatgatagctgatgagctaaaaaataaaaattaaaaaaatcacaaaacaatctcataatgttttaagaaactttacagatttatgctgggccgcatgtggccatgtggcctacaggcctcgagctggacaagcttgctctagatgttggttgttcattggaaacactgagtcttgctgttttctctgtactctgaataatatggctaaccctggaggtagagattcacactccaaggcctccacatgcccttctgtggaaggggctcaggcagttgaacctgggtataccctgggcagtgacccacacatcctgttacatcttcctcaagaggccattcacatgccacctcctcgcagaccacacatgctcccctatgcagactcatcactgtctcattaaggtggtagaggccctcggcatagcatggaggctatcaggccaggtcctaacctagacagccaggaacaaatctttggtccaaagctagatggctacatgatcttgggcaggtgacttaatatccctgtgtcactgggtcctgatccataagagggagaggatggcaagggctgaagtgcagatctgccaaggcagcacccatgatgccctcctcccaggggttggcacatgggtggtgttcaggtaatgtcagtttcaactcttgctactgagggcagattcgacctcgcataccggctgctccaaaacatgtcactaacgctccactggtattttctaaaagtcagtctttcttaggccagttatagacaggattgttttccaagtagcctcctgccctttgggattgaaattcattataaacctggcagacactcacctgctcagtccatgctggggaaaagaatcttagcagaagtttcctaattaaagctaccagagtcagataaagccaggaaaatggttacaggttaaacgatgggattaaacagtgaagagtgccagagcggaggaagaactacaaagaaactgcaatgatgcttcttccaatgtgttgtccaggatgtccagtgaatgtcctccacctctgagccatatggccaaagttacgtggctgagtagggctcatggacgtgtttcatctgacaggtacagagtacacgtgtttttttaaatgttcctttcattgttgttacagagccttccttgaccactgtgcccaaccttaacaagccagcatttctctatgtgtgtgtgtgtgtgtgtgtgtcagagtttctctcttgttgcccaggctggagtgcagtcgcatgatctcagctcactgcaacctccacctcccgggttcaagcgattcttctgcctcagcctcccgagtagctgggactacaggtgcccgctaccacacctggctaattttttgtatttttagtagagacggggtttcaccatgttggccaggctggtctcgaactcctgacctcaggtgatctgcccaccttggcctcccaaagtgctgtgattacaggcatgagccactgcgcccagcacaagggagcatttctatagaatttaagtggcatcttctagagttgtgaggcactgcctggtattaacaccatttataaactagtaaccaacatctaaaattaggaaatgcaacaggaaaacacactgtcttatgaaaacaaaaatcccaggatttttgtaggcctacctcctacttctatgagaagtgggaaggacattctaactacctggccggtacacatggatattatgaaagtcatgggaaccatgaggaactcctcagactggatcctgggacagaaaaggggcatgagtgggaaaacgggtgaaatctggagttcagtaataataataatagaacaatgttgtttcttagttttgacaaatgtaccctgggaatagaagtttctaatgttaggggaactcagtgagaggtacattggaacattctgtattctctttgcaacttctctgtaaatctaaaattacttcaaaataaaacatttatttttttaagaaagtgagaagttctaaaccgaaaggaatgtgtgcttttgagacatgcttcacgtcactcaacgcttttggtgcctggagcctggaggcatttgaatttaggacttctctctctccccgtgaaagattatctgcaaacaccccaagtgatattatatccatattttcttccatggggatctctgaccatcatgatcaagccgactcccttgccttgatttggggtctatgtgatgggagggaaaaaggttcaagtcagggaacgtcctgttttctggggctactatttcccacacccaccactgagcagaaggaaggacattgagcactacacctgatcagtggagtgtctttgaccctctgacagctcttgcatcgaccacagctgcttgcagggctgttctcagtggcagtccccatagccaccaggctgcacagccccagctgagcaaggctcttctacctgcacctgcctgggagcagagctgctaggacccctggagaaaggcagggggcaggcagctggtggagggcagagagagatgttgttgatggttttccaattctcatctggaggtcttgttaaaacctcacccccagagtctctcactcagttggttcggggtgaaacccaggaatttgcatttcttacactttccaagtgatgctgagccactgtcctggggtggcacttgcagaaccactgctgtacacaattgaatccttgcctaatgtatggatatcttgttcttattgtttccagggaatgcctcagtacagcaaaagctgtcaaggcatgctgaggtctccacgaagggagtggtttggcctgttccaatgggtagtagtactgccttgccacacaggcagtccagtggttaaggggaccagattaggagccacccagcccctagtttgaatcctgacatcactgctcactagctgtgagacccttcatcactgtgagacccttcatcactgtgagacccttcattgctgtgagttgcgtaccctctctggggcttgttctcctcatgtgcagattgtacataataaatctgtctctgcagggtagtcagcctacatgctgagagcaccttggccggatcttcactcaggaccattcctctggactgcagattcctatgccacttcttaccaaagtaacaagcattgcacacttgaatctgtaaagcttaattcctaccactttcctcctccaaaccttcttcttccacagtctttctcatccctcagtcttccttatctcagttacaggcaattcatccatctggttgctcagctcaaaattactgagatccttccaccagccagtctaaaccctatggtctcaacacgcaatgtcctaaccatctctctacctacagagcctctcaagcttccagctccagttgcactggacaccctcacagcccttctgcagagctgggaatggccaaatcctgcaggcccactcatgtccctgcaagaatcctgatgttgggagagaaagcatgcatgttccctcctttgctgctccccaaacgaaaggccacctgcagccttatatttgcaagaaactcatgctgagcatctgagcctaggaagacacagagtcctgtcctccaacagccagctctcaggccttctcgaacctctcccttccctgccagatgtgaccttgtactctggatgcctgtggtttggctttctcctcctcacaaacatggatgctgtccttctagcagagggattgatgtgtttatgcatgtatcataccttcccctctgaggatgggggcatgccttgcccaaagcacccagccagggctgagcacagggactcaactaggaggatttttgctgactgataagtccccactggacaggtctgagggttctccccaaaccatgcactctggcagtgggctagtctgaccacctcccccgccgtgtgtgtgagacccgctggtgggcactgtacacagcatggacgtggaagacaagcctggaagtgatgactctgctggagtgagcagcaccacaacacagagcagatcgctggagggaaagatcacctggggcggcactccagggtggagtcaggtgaggggctagaatttcagcagctcttgggggaggggagggcatcatcagacacagatggtaatgggggaaagaggaagagaagggggacaggggtgggagagagagatccacataaggaaggcaggagggcaggaaagggcagtggtatgttcatggagtggatttccatcctgtgtgactgcagctcaggacaagctgggcactggggacagtgatggtggcaggagtgggagctacaagtcagaagttccctggcttcctccctaggaggacatggagttttggaggcacacagacagccccggaaggcaaaagtgttcatcaagcaacctctgactcaaggatatccctggaccacacccctgggagtgagtgcaccagggagtcacattaatcccataaaccctgttgttgtcctgtgactggcaccattcatgcatggcagttttatacattaaaaatgtctatgttttggagccaagtgaagtggctcatgcctgtaatctcagtgattcaggaggccaaggcaggaggattgcttgaggccaggagttgaagaccagcctgggcaacatagtgagacccccattgctacataaaaatgatttttaaattagccaagcataatggtgcatgcctgtagtaccagctacttggtgggaggctgaagcaggaggattgcttgagcccaggagtttgaggctgtggtgagctatgattgcaccactgcactccagcttgggcaacagagccagactctgtcctctttaaaaaaaaaaaaaaaaaaagtccatttttgaaaaggcaatcatctcaataatgcctcagtattttgatagtctcctgttttaaaatgattattactgtttaaacttacatgaagcctctgatcctaacccagtagatggtcacctctagccagagcccaaatgctcatgtttgaagctcgggtttgcccttacctgtggatgctggatgccttctgtacctcattgtcctcatctgtaaagtggggataataataataatagtgtccacctcacaggggttcacagaagttcaatgaatcaataagcataaattgctgcccatagacccgggtacatggcaaacacgcatgaatgttaaggaggaacccccagcaggagaaggccgtgggaaacaactccagaaacagtggacagaggtggggggatgtgcatgtaacggagcgcctcaggagtctccaagcaggagcaaccacatggggactgtatctcatgggggctgcatcgctggagggtcaaattaggtcacagagggcccaggggctggctctgaagctccagccatatcacacacttgagctgcaccctggggctaatggcagagctgtcgatgggaagctggtaaggcaggggaccccaggaatcagcccacgacctgccatgttggtcccagtacacctcccagctctccacagctcccccaagcagggcttcaggtttctacccacagacctggctttgatggagcctgcattttgttttgtttcagaaatactatagtaaaatgagtgtatctttctggttattaattttctgatttttttctattttgcttatttatctaaatggaagatgttatatttcccaaccagctgctatatgaagtgtgagaaacaattggaaatctagctcagagtagctgaaactgtatcagttggagttgaaacaaacatcttttccccactcaggaaagaaaatgagacaaagcaaggaagagaggaaaaaaagagagagagaacagaaagagaggaggtgggaagggagggaagaaaggggaagaggaacccagttcgattatgttttgtttattgctgcattactcaggtgattgcttacttaagtccgactgccaggctgagcttccaatcccagttctttcctgtgttcataaggctcagctagcaagcagtgttttgccccccatagcttctgtagatctggctacagttaaatggtgcagatggaagtgtgaatggagggtgagccccgagagccatttggggctaactgaggtggaagaagatggggctcagagctcggtcagggtcgggttagggtggcttgctattagtgctgagaatggaaattcctcagagtattcagagcagttggctttagcctctgcactggccactggcttgtgatcccgactcacatcaaggtacgggccaggtttgatcctcctggacagagaagaaatgaaaaagtacttcccttttgtccttaagcacctgttcccactcaccgggtcaggcaaatggtgctttagaaatatgccttatttaatgaaacttctccaccttcatctctcagatgagaagtctggggctctggtgcccagacaaagaaaaacacaaggccattcaaagaacattcttgatgacactaattcctgctctaaatactgctgtgatggtaaattttatgtgccaatttgactgggccccagggtgcccagatatttggtcaaacattattctgggtgtgtccacaggggtgtttctggatcagattcgcatttaaacaggtagactgagtaaagcagatgaccctccccgacgtgggtggggcctcatccaattcattgaaggccagaattaaaaacaaaaggctgacgtcccccaggtaagagagaatgctccctgcctgccagccttcaaactggaatatcagctctttgtggtttcacaacagcctgctggccttcagactcaacctgagatgttgattctgtaggttttggacttgtcagcctccataatcacatgagtcaattccttataagaaatctatctgtctgcccaaccatctatctatctatctatctatccatccatccatccgtctatccatccatctagctatccatctatctatatccatccatccatccatctatccatccatccatccattcatctattaatctatctatccatccatccatctatccattcatctatctatccatcgatctatttatctatttaatctatcatccacctatcatctatttattatctacttatctatatctagcattcatctcttgctatctaactatacctatcatctatctatatctaccatctatttctctacctattatctatctgtatctatcacttatctatctacccattcatctgataggttcttattctctggagaactctgactaatacaactgctgccctgaaaaatcacagcctgaaccttagtatcagtctgctgcaaacttgccagaaggattgagagaggcttagatccaggcattctcaaaacaccatcctctaaacaaagtctttcaaaccagaggactctcatccatgggaggccaggtggaggcgtggcacctggagccaggagagaggcacaggatgaagccacagggcaaaagaagtgggtcttcctacagttcactttgtgtgacataatgaagctcaaacattaacttttacataaatcagacatagatagcaataaatagaattcaaattttgcatgacttaaaaatcaatcacgagatgatagagaaacttcacaattgcagtaggctgtggactctgccttcaagatttcttttcccctgcagtgacttggactagctgtttgtttctcatttcctatccatggggaaatacctgaccatcaagggaagagccctcggccatgaggggcttgatgggttggctgtctctccgaccaccttttacatcctgagtcaaattcacatgttgggggacaaaaacctggggcatgaacttgacctccaaatttaaaagtcccctcctctgccctgtttgtgacaagtggcctgtccccacccatcccagtgctcaataaccacaactttcctccagagaggacatctcaatgaaacagatccagaaagcccatctggaccttaaggggaggcccccagggtttcctcttctcctgacttagcctttccctgtggaacccccccatgcttccaggtagcacatagagcctccttgcacctcacctgcccccagcctctgaacacaaagcagaaactcaagcttgttcatctaggcaaagggaaaggcagctcccatagttgaaccactctggtctcaaaggctaagtatttcacacctttcctgaggtttttgttaggtaggggccatgtgctctgcaggagccagcactgtgctgcatggacttggctgggacaatgaattcttccgacttcttcaggagctaggcgggatatcaatcaggaggaaagaagcaccagaggctgattcacaggcacaggtctcttcattggctggagggtggcccatggccaccacgacatgcagaggcctctttatttaaccttgcttgtttcactgcacacacacataagcacagacacatgcacacacacacacaagcatacacatgcaagcacagctctacatcactcctccaaaacttttcagggttgcccaagcccggttcactggagaattcctttctctggaactctccacttgccatatggagctatgcaaattaaagtgaccacatagctgcagtctctgttcagacctgcattcccacccccacttcctcttccctccatcaagtcttctttccttctgtggctactgctttctctcctactgtcatgacagggatggccatacagggacagagaaagaggttaagactgaatccaggagacctgggctctccttccagtgccagcactgattaggaatcacaaaccctccttgcacttgtctcctcactgcctccgtggacttgacattggttttcctgccacctatttcgctaggagatcagaagaattaatgggcactttgtcatccatgagtctaaagattattggagttaactgcattctctgtggcaagcaacacgctggctccttgccgtgttcctgcagctttctggactcagtgctgtccattggtgacactgaggcactacccctctcctccattctcccctctaacacagggactagaaacctggaaactacattttctggaacctcatggaatggaccaatgagggagacagttgcccagtatttaatggacaggagccatatcgtttttcctggggcagcaatggtagatccacaggctctgcaggatgaacttgatttacagcctgcaaagttcccagctatgtgctacaggcaactgtagtcattgctggtggcttgcagcaaagtctggagtctctgaaatccagtggcatatctgagaacttcagccagttccttgaccttcactcctccaaactttcaaatggttttggaagcattacattgtctacgtgaaatccctttctacttgagatattcacaatgagttctgggcatgtcctgtgcttgtgtatgtacatttgtgttttcctctctgatacacttagtcctgaaaaaaataccaagcatcacttgtgtatttaactcaacgtctgaaatgttggcttacatggaaatatccgataacattggcataaaacaaggtatggctgtcaattgaggactcttagctctgtgagggaatgacaaggttagtcggagaaggcctcagtattttcaatcacaagctttccgaaacatgtttcagtgctgtcccatttcacacattatattacattgtccttggaaaataaatctcttttatttttgtataaattaaattcctctgtaatcagttccaagtaactagctaaaccattggttgtcctataactttgtagtgttaaatatcactgacaaatacatttaaccctcagagagtctgaaagcttgtgttaaagggatcatttaatctgaccgtagccacaataaggggtttgagttggtttcctcgtggcctcccagatggtgctgggactgcatcaaggctggtacccagtgccctccagaatattctgttccacctgctctctggccttgaggctaaatgagccatttttctgttttcaacagacttgattttgtccccttcttttaactgatggccacagtgcttttctttaaaaacagagggggattctctctttgagatcatcaggaactagccaagctgtttgaatgcagagaaatgaggaccaaagggaaaacagcttaatgccacagagaggtatctgggcactgaagtgtgccaagcacactgtgtgaagatgctgggcacccagcagtgagcaagagcttggtttgcactggagacactggggactccaaagtggaggaggagagacaggggcaagaattgaaaagcttcctatcaggtactatgttcagtatttgggtgatgggttcaatagaaactcaaacttcagcatcatgtaatatattgtggaacaaacctgcacatggacccctgaatctaaaatacaaaataagtaaatcaataaaagtttaaaaaatcctttcacttctgccatgcaccacatcacattcacaggtctcacccacaccaaggaagggggtcaggctgggcgtgtacaccagggagcaggaatgttgggaaccacataacgcattgtcctgatggaacttccatttcaaccagggagatacactctgcatgtaactggaagggcggcaggcaggcgcagaagagcgggcactgtgggagggcatctggctccatccccatagcagtagggcctggcccagtgcagggcccccatcgcctgcctccctaaagtgcagctcagcctcttctctgctcacagaggcatctcacacatttgtgacaactggcactggcttattcatcatctcagatagcaactctctgttttctcagacacccactttaatactctgacatttctgttcagcccataacattctgtcaattgtttacgtctcgctcttgcaccaatcgccttttctgccgtgctgtcggccctcccaggccctggtacgtgctgcttagcaaaagggtgggtgtcaccctctcgccgtccacaccactggatttccaaagaagtgtgctgcatcccaagccgccaatcatctcccaaggcactcacaggatgctcctgtctcacggtagatgctgcctacagaaaggcagtttgttgggctctgttcacccacaggagcctaagcagggactcccattctgcccctctccagttcataaccaaaaggcctgttgccagaacctgcaagagggcagaattgcactcctttccatctaccccatgtctggcccatcaataggacctgctgtccatcatctggccacccatcctggctcccctccctcagtctggaccccaccctaccccattcacccctgcaggcactcagcctttatccagaccacacacggcatagtcgtcttaaaacatagtgtgcaccactgccctggggacaccctgtaaggggcttcccactgccctaaggatggaatccaaacttccctccatggtctacaaggccagcgttatctacccactgctcccctcccctccctgaccatctcaacccctcacacatgccaggtcaggccactctcctaagtgaaggaatgcaggttgtatttcaggtcctctgcctcctttccatgtcagggttggggcatgtgccattcccctcacatggactgctccctcccacccctatgggaaaaggagaaattctgtaattagtggtgttgggacaaatgaacaagcatttgggggaaaaaaacaataaaaacaatgtttggttcctacatggctcctacctgtcctgcaggctttgacttaaacattagtttctggaatagaaatatcccatattgattctttgcctcacatacttgttagaattttcaagcattggatgaatttgtctgtttaccttttcttcctgtctgcatgacaacctgcaagtctcagcaaggcaaaaactaggccttgttgctcaccattgaatccctaagcaacgcattgcctaacgtagggcacaagctcaataaacatctgtgggatgcaggaattaatgaatcaataaacactaactctgcagtatggacaatgggagcccactctatggtttaaaatgtgaaagggcaggggaaaggatcttgtcataccctatattagaaggcattctgaggcataataattaaaacaatgtggcatttctaagaaagagtgaatacaaggccaggcgcagtagctcatgcctgtaatcccagcaatttgggaggccgcggagagcagaccacctgaggtcaagagttcgagaccagcctgaccaacatggtgaaatcctgtctctacaaaaataaaaaaatttgtcatattagggtgtggtggcacacacctgtagtcccagctactcaggaggccaaggcatgagaattgcttgaacctgggaagcagaagttgcagtgagcctagactgcaccactgcactccagcctcagcaacagagtgagattccatctcaaataaataaataaatataaaagtaaaaaatagaaagtgtgaataaaaaattaatcaatggaacagaataaaaagtgaagtaagaaaacatatcactcaaacattaaaaatgttgctttccaaatcaacaggaaaataaattattcaaaagattggtatggacaactagctaacaacaagaagaaaaagtgagctacagtcttgcctcgttacaatgaaataaataactgtgaaatgactaaacatttgaatggaaaaattaaaccattgcactataatataaaatttcttttaattacagtgtaatcttggaatgaagaaatcctaagtataaaactaagggcagagccatagagaaaactttgatctcttcaacgaggtaaaaatgaaaaactcaaacttaaaaactgttgttgtggtagcaggattttcagccatggtggagagaagagatcagcaacccttctccccataaaacaagtaaaaattggacaaaactatcaaaaacaaacactaagagctctggaaattgactgtctctgtccattgggctgctataacaaagtaacacagactaagtggcttacaaacaacctaaatttatatcagttctggaggctgggaatctgggattggggtgccagcaaggtcgagttctggtaagggctcttttccagggtgtagactgccaacttctctttgtgacctcacatggcagaaagagagtcagagagctttctgggctctatatataagggctctaatcccattcatgagggctccccccctcccaaagtctccacctccaaataccatcacaatgggattagggtttgaacatataaattttggggagacacaaactttttccataacattgacccaaagcaaacaataaactggaggcatttattcatgaaaactgcaagaattttgagtaagaacagtaggatttggtgatcttcttgcctagggctgctcccttctcttccccagctaaattggcatggtattttttttaggacaagtctggctggaaaaacagcatcttcactgccaaagggagctgatctgttttggagtgaagagcaaacctgtagttggttgtgttgtctttaaaagttgcaaactcagaagaaaattaaggaggaaaacccacaaccctgctaatgtaaagttgcagtcccagttggggcaaatggggtgaatggataaccagaaatttaatgcgaatatcctggaagagctaactaagctatccacacatcttgggttttatctctacctagagagcctctagcatgtgcagggaatactcaagagggcccagaagaaagtaaaactaaatcttaaggcagatttgaaaactgcctgaacatggggtacaagctacaacccatacacaaatcaatcagcagagtgtggaagcactgagcatcttccaatgactgactgactactaatctatgcagacacaggggcaactcttaggaagtcaggctaaaaataaaaataaaaataagaatttaagaaactaaacagatgtatcaaccacacatgcttagaagacagatttcatgtattaagtccaggcaagttactttttttaatgcttaggggaaattttacaatccagagtttgcataaaatattattttaaatgtccagttttcaacaaaaaattgtaagaagtggtaaagtataaattatactcagggagaaaaaaagagaacctatataaactgatgttgagtgggcccagatgttggatttggatttagtagacagagagttcaaagcagctattagaaatacattcatgtttccatggtgtaatggtgagcactctggactctgaatccagaaatacattcaaagaattaagaacactatgtttaaataattaaagaaaaatcactgcttcacattctatcaaaaactgaactcaaaatggatgagcaacctaaatgtaagagataaaaccctaaaactcttagaagaaaacctagaagttaatcataatcttggatttggcaatggattcttagataggacaccaaaaacatgagcaatgaaagcaaaatagataaattagactttatgaaaattaaaaactttgtatcaaggaggttatcgataaagacaaaaagatgacctacagaatgggagaaaatatttgcaaagcacacatctactaagaatcaggcattcagaatacataaagaattcttataactcaacaagaaaaacataaatgcccaattaaaaattgagcaaagtacttgaataggcctttctccaaaaacatatgcaaatggctaagaagtacataaaaaacactcaacagtattagtcactagggaaatggaaatcaaaaccacaaatgaggtaaaactttatatttcatacagaaaataacatggtgaggatgtagagaaatcaaaactattccacattattggtgcaatgtaatatgatgcagacactgtggaaaacagttggtcacttcctcaaaagctaaacatgaagttatcatatgacttagcaattccacttgtacatatattccccaaagacttaaaaataggtactcaaacaaatacatttatatgcatagttatagtagcactattcacaatagcaaataggtggaaacagcgaaatgtttatcaacaaatgaatgaataaagatatcatggtatagacatacaatgaaatattatccagccatgcaaataaatgaagcattgatatacgctaccatgtagataaacctcaaaagcattatgctcagtgaaagaagccagacataaaacgtacatatcataggacatcatttatatgaaatatccagaaaaggtaaatccagacgtacagaacacaaattggtggttaccaggggccgaatgaagggagaaatagggtgtaactgcttaatgggtataaggtttctttatggagtaatgaacatgttttagaaaaatgttgttgatgtcctaaatgccactgcattgtacacttttaaatagttaattttatgcacactttaaaatagtgaatttcacctcaattttaaaaatctaaaaaataatgaaaggaaaatataataacaatgactcataccaagaaccaaaatagagaaatataaactataaaaataaactaaataaaaattatagatgaaaaatacaatgacgaaatgaaaattcactagaagagttcaacatcagatttaagacggcagaataaagaatcagtaaactgaaaaatcataaataaaacttatctaacctgaaaaatggagaaaagattaaaaaaaaacagagacatcaagtgagacaacatcaagaatgacaacacatgtaaagtgggagttctagaacttgagaagagagagaaaggtatataaattgaatattcaaaggaatagtagccaaaaacttcccaaactggatgaaaacaatttacagaaccaagaagctcaaaccaaatgtaggataaatacagtataatcagcctgctgagagctaacaaaaacaatcagaaaatcttgcaagtagcaagagtaaaacaacttattgtgtagaggggagtaacaacaataattaacagcagactctgcatcagaaacaatggagtccataaggcagtaaaataacattttcaatgtgctggggctgtggtgggtataaaactgttaaccaagaattctgtatcaaaaaaaattattcaaaaatgaagggaaagatgctcctaggtaaacattgagaaagtttgttagtagccaaccaatcttgcaagaaatgctgtaggacatttttcaggttgaaaggaaatgtcaccagatagtaacttgaatcaacaggaagaaatgaaaagtttaaaaatggtaaatatatcattaactataaaagaatgattaaatatatattctgcttttttctactcttaatttttttcagaaatataagatttcaaaaaggaattagaacactgtattttttagcttctaacacatatagctaaaatatatacgacaataacgccacaaaacagagagaagaaatggaactatactatagcaaagtggcctattttgctagaattaggtcagtactaacctgaagaaaattgtgatacctcaacagatatattttaaacctacaaagcaaaaagtatttgaaaaaagtttaaaaatacatcattagaaaaacagaggaattaaaatggtacatgaaaaatttttgtttaacacagaaaagggcaaaaaaaaggagggacaggaattaaaaaaaagtgagacatattgaaaacaaatagcaaaatggcagatgtaactatatcaataattatattaagtactgaagaactaacctctctaaacaaaaggcaaagattatctgaaggataaaaaagcaaaatccaattatattttatcaataagagacacgttgtagactcaaagacaaataaatcaaagtgaaaagacaaaaatagatataacatacaggcattaacaataagataactagagtggctacattaatatcaagcaaagttggttttgagaccagaaatttttctagagataaaaagaaatatttcatattaataaagccttaatacatcaagatggaatgagtgttgtcaatgtgcattatgaatctaataatatgtataataatatgtgtattatgaatctaataatagacttcaaaattcaataagcaaaatctggcagaattaaaagagaaatagataagtcaattattatagttgaagatttcaataagccactgtaaacaatagataaaattagtaaaaatataaatacataaattttacacatataaagatattagtaagtatataaatatataaaccactatcaaccctactgacctaactgacatgtatagaacactccaacagaagaatatagtcctctcaagtgtataaagagcattctccagaatgaataatgtctaggccatgaaaaagtcttgatgaatttaaaatgatctgaatcctttaaattatattctctgcctccaatgaaattaaattagaaattaaaaacataaagaattttgaaaatttggaaatttaaaaacatacttctaaacaaccagtggctgaaaaaaggaaattacaaaagtaattagaaaatattttgaacagaatgagaatgacaacaaaacataagaattattagtgcatcagggaagggttgcgggattgcagatgattacatagggcacaaggaaacctttggagaagacagatgtgtatattattttcagtgtaaattcttgcacatgtacgtatgtcaaaatgtattaaatattagtttgtacattttaaatatgtgcagcttattatatgacaattatgtttcaataaagttattaaaaagtgcaccttgtggtaaatttataacattaaaagctcacattagaaaagaacaaaaatctcaagactctaagcttccaccttaaaaaaaaaaaactagaaaacacaagcaaattaaacacaaatcaagtagaagaaaaaagagatattagaacagaaatcaatgaaaatgaaaataggaaaataatagagaaaataaaattaaaatttagtttttcgaaaagattagcaaaattgataaacttttagctagatgggtgagcctaaaaagaaagaatacaaaaattaccaaaattaggaatgaagaaggtgttatcactaccaaacctacaaaaattaaaaagatcataaagagagactatgattaactttaggccaacaaagttagacaactcagataaaatgaaagtcacaaatcaccaaaactgacacagaaagaaatagaaacatgaataaaactacaagtaaagaaatatatttaatagttaaaaaatcttctcacaaaacagcgcaggcccagatggctacactaatgaattctatcaatattaaggaaataatattaagcctacacaaactctttcagaaaacagaggagagggaaacatttcccaagtcgttctataaggctggtattatcctgatgtcaaagccagaaaaaggcatcacaacaaaggaaaacaaaagatcaatatttctcatgaagatagaaaaaaaaaatccttaacaaaatattaaaaaattgaacacggctacagttttttaaaaaaagattattatataacattacaagtgatatttatctcaggaacacagtttagtttcacatctaaaaatcaattaatgtaatacacaatattaataaaggaccaaaagctcacatgattttctcaattttcaaaatccacacccatttaaaataataactttctgcaaaccaggactaaaagggaacttccccaacctgataaagttggggaaacctatgaaaaacctacagctatcaacatgactgattttaaagactgtattatttccccttaagatcaggaatagggcaaggatacctggttgtaccttttccattcaccattgcagcggaggaccaagtcaatgcaataaagcaagaaaaaaaatcaaagacatacatagttgacccttgaacaacacaagcttgaactgcataagtctacttacacatgaattttcttccacatctgccacccctgagaggaacaacctctcctcttccttctcctcttctgcctactcagcgtgaagacaacaaggataaaaaccttcatgatgaatctacttccatttaatgaatagtaaatatattttctctttcttatgattttctcaataacattttattttctctagcttattttcttataagaatgcagtaaattatatatatatataaaatatgtgttaatcaactgtttatgttattggtaaggtttccagtcaacagtagggtactagtgttaagttttggggcagtcaaaagttctatgcatattttcaactatgcagagaagtcagtgcccctgattcccacattgttcaagggtcagatatatattgaaaaagaagtaaatttctattcatttctacagatcataaaaagctactggaactactgagagaattcaccaaagtcacagataacaagatcaatatgcaaaaaccaattgtacgtctatagactagcaatagacaatccaaaaaacaaaattaaggaaaaaaaattcgcattagtatcaaaacaaatacttaggaataaacaaaagatttatatatggaaactacaaaattacaactaaaaacttgtacactgaaaactataaatcattacatggaattaattacacagatgaaactcaacacattatgctaagttaaaaaactagacacaaaagaccacagattgtatgactccatttatatggactttctagaaaatgtcaacctataccgatagatagcagatcaatggttacctgggactgagtgctgagaatggaaaccaactacaagtcatgaagaaacctttgggagtgatggaaatattctaaacctggattgtggccactgttgcatgactctatacatttatacataaaactaaaactcattgaattgtacacttataatcattggatgctttggtttgtaaattatgtaaattatacctccataaaatggctaaaaaattattgtagcacttccacttttgataagggtatgatagattatttgaactgtcatttccccatgataactagaaaaactagataagatattaaaaataaaaaaaatactctaaggaaatacagaactaacaaaatacagaagaattaacactccatgatcaatgagaaatggaggcccaggaggcctagaatttggggttacctttttcacctggggatatataccaattccggttaggaagactgagaagtgcttttaatagactcaccaaaaaaaagtattgaagattgctgcccaagtttcaacaaagtatggtagagaaactggatctcaaagataaactattgtaaggcttgcttttgaaattaagaattaagtcaaaaaaataaataaaagaggatttggaagtgaagtacaagttgtggatatttaaaaaaaagaaagtacaaattaatacaataagtgggtttagcatggttgctggatataagagcaatatatttaaaatatgtatttttacataccatctacaaatataattaaaaccattacaacaaacatcaaataaaattatatatcaaaagcctagtaataagccaaacaaaaatgtggaagatctccacatccaagattaaaatatatcattgagaaaaatataaaagaatataaacagagcgatattttatgttcatgaactggaagcttgattttgtaaaatattgtattttccccaacatgatctattcaatacaatcacaatagaaattccaacagtattttttttagaagttgacaagcttattgtatcaacgttctattgccacaaaacagattatcaaaatatcattggctacagaaaacacacattccttatctcacattttctgtacgtcaagagtctaagtgtggcttagctgggtctttgctcagagtctcacaaggtggcactcaaggtgttggtcaggctccgttctcatctggagatcagcggtcctcttccaagcccaggtggttgttggtagactttaatccccttgcagttgtaggattaagacctcagttcctagagtctacacccaattccctgtcacgtggccttctccatagtcagtttacatcatagcagcttgcttcttcaaagccagtagaactgaatgataacaagactgagtttatatatatgtagtacatatgtgtgtgtgtatatatatatgtacatatatatatatatatatgcatttgctttacaggagaaaagtcacacttgagagttagaaggaaatgacaatgggacaactagatatctatcaggaaataaaattgatcctaccttacacaatactcaaaaatcaatacccagggaattttagacctgaatacaaaaggcaaattaataaagccactgaaaagtaatatacgagagtatattcatgaccttagggtagattttactacattaagactaagaatttctgttcatcaaaacattccaacagaagagtgaaaaagtgacagatcatgggaacgcacctgtgacacatgaaactaacaaaggcttttcaccaaaaccacaaagctattggaagaaagacaggtgagccagaatagacagatggcaagaagacatgaccaggaacttaggagccaggatctccaaatggcaaataaacagcccagaagtgttccacctcattagtcacctaggaaatgctggttaaagccacaatgagataccacgacccacacacctgaatggttggaatttaaaaataaaaataaaataaaataataagctaacagcatgacgttttggcaaggatgtagagcaacaggaacagtcagacactccacgtggggtgtaaattgtacaagtacttcggaaaaatgtttgtgagtgtatgccaaagctgaacttacacatactttaacacaattttagttatatatgcaaaagaaatacacatgtatgtgaaccaagagacacatacaagaatattcatggctgcattatcaattgcccccaaaactggaaattacttaaatgtccatcaacagaataatggaaaaatacattgtgctatagtcataagatggaagactgcaggaatgaactgcaagaatgataaggaacgaactacagctacaggcaacaaacacataagatcacagtgcatattcccatttatataaagttcagaaaattagtaaaactatgctatagtatttagggatgcatgctcacatggtaaactataaagcaaagcaaggaattgcataccataaaagttagcatgctcttttggtttggcatggattttgctggggacgaaagaatagtgattgtgaagtacaaggagatttcagattgctggcttggatggtagttacgtgggtgttcagaacgtgattattattgagctatatgcttttgtgcacttttctctatgtggtatatttcatgataaaatgttttaataccattaactaaaaatttattgcaacatatatgataaaaattttgtatctttaatatgtagtcagcttttccaaatcaaatgggcaaacaagtgtgagatagaaaaacagaaaatcaaaaactacaaatataagtgtccaataaacacttttaagtagccaatctcagaaatcaaagaaaggcagtttaattatacaatagaaacatacaacaataagggaatttctatgcaatagacaatgattagccatgaaaagtaatgttataaataatattgatgatatgaaatcatagtcatgatataataagtgaataatatgggttatcaaactattgaatatgtgggagacagaaccttgcttactatttttaaaaagtccatgttgtaaaactgaatataattgtgatctatttttttaaataaacctatatgtaggtatgtatttatctatatgtaaaggaaacaataggatgattttgttgtcgttgctgttactgttttgagacggagtcttgctgtgtcacccaggctgcagtgcaatggtatgatctctgctcactgcaacctctgcctcccaggctcaagcaattctcatgcctcagcctcccaagtagctgggattacaagtgcctgacaccatgcccagctaatttttgcatttttagtaaagacggggtttcaccatgttggccaggctggtctcgaactcctgacctcaaatgatccgcctgcctcagcctcccaaagtgctgggattacaggcatgagccaccgcgcctggccaggatgatgtatttcaaaatgttcagtgaccatctctgagtgctgaggttacagattattttcattttataattttctttacgcatgttctaaatttttctcagtgagcatgtattagttatgaatatggaaaaaagattgttcttttttcatgataagccaagaatcatagaatgtcatcagcacagggaagctgtggggagttgaaggtggagagagagtggatattttctcctgtcccccctcatctaccacccatttgccctaaatgtcagtaaggaagattttttttaaacagaaaatagatcaagacctaaactgtctggcagcagagagacgattctttgtccaaatcaatgctcaggcaaatggtaaacaggaaaatctctgacagagccatcattaaagccaatctggaggaaggtgaagatttccaaatacaaaatatggcagctaagagtcaataacaaagatggtgtggaggcacctcatttcagagaaataaaatctccaggtatttctttgtcttgttgcttttttgccattgaccagatttttttttattttaactctctgtaactatgaacaccaggatgtgaatgaggactgcgcttgaagccacctaaaaggtagaagaacacatctaaagcccccagcaaatgagcacacctcgcaggtgtggataatggcagctttgcacacccacctgaccctgtcttgcggggttaataaaggccatcacttaattccttcacaaagccacagtgctccgtagaggggagccttggtaattattacacccataaggtgagtcaagattacagtttatgtgcagctaataaccacctatcagcaattttctcactctctctttctcagtctctttcctgatgagctactcacctgtgtcctgggagtcactgaaaacagaagccaggagtaggagagaagagcaggagggatgggggggcctgtgagtctctcccagtatcagattcatcccagagaaggctgagccccggcaagatgatctgaaaaactacagggctccctggtgccctctgcaatagtgcataacttaaaaccataatagtaggccaggcgtggtggctcacgcctgtaatcccaacactttgggaggccaaggtgggcggatcacttgaggtcaggagttccagaccagcctggccaacatggtgaaacccatctctactaaaaacaaaaaaattagccaggcgtggtggtgcatgcctttgattccaactactcaggaggctgaggcaggagaatcggttgaacccaggaggcggaggttgcagtgagtcaagattgtaccactgctctccagcctgggcaatagagtgagaccctgtctcaaaaaaaaaaaaaaaaaaaaaaaaaaaaccctaaaatatgaatagtaaacctaaatgaagttcaagaaagtccaaaatgtcttgatttatgcccacgatggccactcagatttgttttttttttcctacggtgccctgctttgcagtgtcttaggcccactgcccattactgaccctgggatggtttgatctcccactacctctttgggataacctttaggttgtgcttttgatcaaaatgcaatgatcatgcccaaaactcatcgtaaatttcaggccaattcccaaaacatcctgggtaggggagcccaggcacccacagccatgaccttgtatccccagagtgttcccatttcaagcacactcaagcaggtgaattctcctgatggaagaattcaaaggacagaaatcaatttttttttggctgttactgttttctctttgttctacacttagaccccatactttttgttaaaaatggaaaagagttttggaccactgggctttctccagagtaaatattagactagatggttatgaagctcatttggtcagaatatatgactcttaaagaaaaaggggatcaggactcagggacagctgagccatctgcagagggagaaggttcaggacaatcacccacccagccattaatgagacatctgaccaagatcaccacatcagcagccagctctttcttacaaaagcaaaggcctgtcaatctgagacatagagaaggcccacctgcagcgtatttcatcgagtgtagacacagccctacgtcagatagttatccttttaatttgactgcagtgaagtgctcttgtggccctgacagtattctcttgtgcaccaaaggaagtgaataataattaaagagtcctttggacaatatccttctatctgaggaatcatatactcaaataatttaatttgtaaaacctcttcaccaccttactgcccggctttcattttcttttgcatatattttcaccactcaactaatgatggatagagggaattaagacatggttgattgcatctcataaaggcacttggacacatttaagatcactagcctctttttccttcccagcaccttctaatgtaatgtgttctctgaacacatgtgtaagacacacactgatattaaaagctgtattctataccacctaataaagaggatgccacatcaaaaggcagagttaacatcaaacacgcacaagaatcatttaagagattagaataaaggagctggtggaaggttgatgccactaaactaccttcactcactacctctatccacaagggcaaagttaaacagccacagaaagatggcggggccacagtgcccacagcccatccaacagcacattacactttgtcaccatgtgaccctagctatttccaaaagtatgaacaaatatgtgcaatgatgaaaagtactcagtatattttgtgtgtcctctagaaacaaaggaagaatgctcctgttggggacatgtcatctatttttttcctaagtcaagaattcaacctctgacttgagccagttcaacagaacctagagtagctatttattcacgtaaaaactagcaattctgaggcagataaaaactggtgaccacgtgcttgggtcctactgcagacttctggggactaaaccccggttctgccatgcccttgctctgtgaccctgggcaagttactgagcctctccacatcctactttcctcactgtgacatggggtctcaataatggcccctgtggccaggcacagtggctcatgcctgtaatcccaacattttgggaggccaagttcaggagttcaagaccagcctggccaacatgacaaaaccccatctctactaaaaatacaaaaattagccaggcgtggtggtgcacgcctgtaattcctactcaggaggaatgtaatgcctactcaggaggctgaggcaggagaatcgcttgaacctgggaggtgggggttgcagtgagccaagatcgcaccactgcactccagcctgggcaacagagcaaacttctgtctcaaaaaaaataaaatgaaaaataataatggtccctgcttcctaagatttcttttgtgaggactgaaggagctagttcaggcaaatcagcgtatttgcactctttaaaagtaaatgataaacagatattaactatcatcattagggcaaagaacgaattctatgtgaacttaaagtatcattttccaaactctgttccatagaacaatcaagatgttaatattaataaatgctccagagaaggaagaaaaattaacctggccttggtcgaatgtggcggtgcacacccgtagttccagcacttcgggaggccaaggcaggaggatcacttgagcccgggagttctaggctgaagtggacagtgattacaccatcacatcccagcccaggtgacagagtgagaccctgtctcaaaaaaacagaaagtttactgagtagataagtgaccagttaactgacccttaactagtcagttaaggagggatgtcatgggtccttggttgacctggtctttagttctttgtaactttaacacgttgaagagtttatgaatatctcatggctgaactccacttggaaatgatgagctaaacacaactgcaaaatttctttttataagtttttttctttctttttttttttttttttagagacagggtctcattctgtcacccagtctggagtatagtggtaaaataggttcactgcaacctcaaactcctgggctcaagcaatcctgctgccgcagcctcccaagtagctgagaatgcaggtgctcaccactgtgcctggctaattttcttatttcatttttttttagagacagagtcttgctatgttgcccaggctggtctcaaactcctggcctcaagcaaacctcctacctcagcctcccaaagcactgggattgtaggcatgagccaccaagtccagctatttctttttaaattatattggaaagcaaaaatagatgtaggaaagcatgcttcctgtctgagtgatcctggtacattctctatgagctccccaaatgaaaagtccagcacattcaagaagcttctaaggcctagacctctgtccagagatgtagcacatggccaaaacagaagcaggtcaggaagatgttcaggatgacactgatggcacctccaaattctgaaggaacagtaggaatgtgcagggttctgtttagatgaagtaacagactgaaaaaaaaaaagcttgagtacaaggaaaatatcttttaagactgctaaagaggtcaagagagaaatgaaatggtgcaaacttgacatttgttttgatctctcaaggaaagcatgattttgaaggaaatggcagccaatcataatagaaaaaaaaaaactgtggattttaactaagctctacctcctaaaccaagtggtctctggcctgttaggaactaggcggcacagcagaaagtgagcagcgagcaggcctgtgaagcttcgtctgcatttatagcctctccccatcacttgcatgactgcctgagctctgcctcctgtcagatcagcagtggaattggattctcacagaagccaaaattctattgtaaactgcacatgtgagggatctaggttgtggcttcttatgagaatctaaggcctgatgatctgtcactgtctcccatcaccccaagatgaaacaggaaaacaagctcaggactcccattgattctacattatggtgagttgtataattgcttaattacatattacaatataataatagaaataaatgaagtgcagagtaaatataatgcacttgaatcatcctgaaaccatccccgctggtccgtcgaaaaattgtctttcacaaaaaccgatcccggtgcaaaaatagttggggaccgctgtcctaaatggcatcatcgtgatcactcctgagactcgggagacctcccacaaaatcctaaatggaaatccactttggctcaatgattgaaattcattccccaaacctcagggcttcaacatcagccagattttcatgagaaaatcctagaacactgtccagattattcgacaggtgaaaggaaagcactacaactcgcaaattcattgcttcacttctctgggaagcggtttcttaccaaaaatgaccaaacctgacttgcccacttcatgaggctcggaatggtttctggccatgctgcaccctggttaacactttcagagaatgaaatcataccagtcaaagtcatccagtggaaatcaggaatattcctaaaggtagaacacagaagaagagtcagaacaaaaattcttatggcaataataacttcattttaataagtatatggataacatgactattttacagggggtgggagccagttctcattggctggttttaaaacatcagcctcttcacttccaaaaactgcactgatccctaaatgcgatacaccatgccatctccttaatttatgtaaaacagctttatttcttttttctttttaaaatattttttagaggcagggtctcattctgccacctaccctggagtatagcggtgcaataggctcactgtagcctcaaactcctgggccgtagggatccttctgccactgcctcccaagtagctgggaataccactgtgctggctattttttttattttttatttttttgtagagaaagagtcttgttatgttgcccagactggtgtcaaactcctggcctcaagtgatcctcccatctcagcctctcaaagtactgagattgcaggcatgagccactgagtccagctatttctttttaaattatattggaaaatgggccaggtgcggtggctcacgcctgtaatcccagcactttgggaggccaagacaggcagaccacctgaggtcaggagttcaagatcagtctagccaacatggcaaaatcccatctctactaaaaatagaaaaattagccagatgtggtggcttatgcctgtgatcccagctactcgggaggcagaagcaggagaatcacttgaacctgggaggcagagtttgcagtaagctgagatcaggccactgcactccagcctggcgacagagcaagaccgtgtctcaaaaaataaaaataaataaaataaattatattggaaagcaaaaatagatgtaggagagcatgctccctgtctgagtgatcctggtgcattttctatgagcgtcccaaacccaagtaagtcagagtcaaagacatacctggaatgcacttcaaagtgaagccctttatgctccatgaactaagacaattgttcaacaccaaagatttcaatgatggaaagggcaaatcctcatgagcggaaacggtgacaccccaacttctcctgctccccgagacaaagccaatatgattctaaggaggccttttctttacaaagaaatgtgccttccaaaaggaggaaccatgtcaccaattaagacatttcccaagcatttgctaacctacttacaggcatcattgctcccttgggcctggggacccctccaccttcctgaacggagtagctgaataggtaaatgggttatatcaggccaggaaatcaatgtgtatactgtgttctcagccacagatgagcatgtcgaagccattctattatagctctaggagccgtattgatccagctgtaactactcggaggtggcccgcaatccaatgagaacacatccatctgtccatccagccgcctctctcccccagtagtgcttagagagtaagtgtttgcagattggattaatttaatgtttgcttaatcaaaactgactaccctggaacttaaatgctattaattactaagagaatccagaactaattcactagcactgtgaggccggggaggaacagccgctctgcagagaaagggagtttctgtttgtctctctttccagatgttcattttgtggccttccccactcccattaccactcacccacctgctttccctcacagccttctaaaaagaaaaaaagtacttgctactttggtgtttgctctttggagcatgcatgccgcatgcatgggagtctgctggttggatacacagagcctccacctcagatgtcccggcagcatgcattgcgtcacttgcttttccagtgcgctctggtgaaatagcaccctgtctttcatctacttcttggtgcaaatggttctttcccagagccccgagagctccccaaagataggagctccccaaagacttgctaatctgtgatgccccagcaccgagcactgtgcctgttgcatactggcattagcaagtgttttctgaactgaactgggggaggagacgatggcccctgccaagggctctatgtttacaaagccctctgcggcattgacacctctccagggagtgtctcagaggcttcagttcaactgcacctgcatccaatcctccatcttccttgtccttgaaaagacagcagactgttcttagaaccaggacccaatgcctatcttgcttatgaattaaatgccatcacaagaggagtgtgaaagtgcatatctgcctccaaatctatcccatggctttgcaaaagcataaccaaggaccacaaaatgccatgcagttcagccagagggctagcaggagccagaagaggcactgctacaccctgaaacgtgtctttagccccagcaataccacaggcttttggtaaaacaactgcatctgggcatctgcagtttggccatgagcacatatcacatctcatgaacatctcactatttgtggtgagtggtgagtggttccactatccactatgtgtattgtacagaaaaactccactgctctccaaagggaattcctctgctgagcacctggcccctggggtggtcactccttaaagcagaggttcttctgcaagggcatggttctcagcccccagctaccactcgggaacttgcagctattattacaggcattgcagacttaaatccctacaaggacacagcaggcagagtaaatgaccgaagctagtgaggcatacgtccctatgcagtggagaggagcagagcaaactggggagcctgtccctctccaggaggggctgctgtgactcagcgctcactgctgttcccctgcagaacacaggctcagtatgaataaatcttcttacttctgcatgacctcaccctacagtaaaatgctggcaacgaattcaatttttaaaacattcacatgtcattcaaataaggtctatagttcagttaataatattgtaccaatgccagtttcctggttttgataatgtgctatggtcatgtaagatgttaccattgggggaaggtggggaaagaatacaggagaattcttggtgctatacttgcaactttgtgtgcatcttaaattattttaaaatggaaaattaaacacacacacacacagtgcaggccaagctacatagctcaacaagccataggttttctaagtttgttgacatcccttggtcacatcaaagtgggctagtgcctcacgggcaaaatgggagaaagacccaaaaccctgacctgacagcttccacacatggccaacctcagctgttgacctttttatggaaccagtgccctggaggtgacactgcagacttagctcactgaagtcctgcctttgccagatttctgaaatcaaatcaccactgcaccacacaacacccactaattcatatgcattttgcacaaataattcttatttgatgaatagagcaccagacttacaattcagccgtggtgtggtaaattacactggccagattaactgtacaaagaacacctctcaaaacaatgatttcacttcgagctaagggggaacaagtgccctttctttcatttctaaattacattttcaatcataaatattgaaaattacatttctgatcaccgctgtcaccttgtgagtagtggcacacgagccccacagacacacgggtttttacagaaggaaagcgagagccattagaacaccctaaccactttgagttttaaagggcctgttctcccagcccacaagattataaaacgatggcaccctttggagcttgcagaggcagggagaagcagtctcactggcacattggttgttaaacatatggaattattactctgggtgtattttaccacttattatacatgggctgttccaagtatatacaggtaggtatggtgcagccattgccccagagaggcagacaggaaaacagatcatacttctgcctggtagacctctgaaacatgtgagcttcttgctatgagcaaaataatttttttaatgtaaaatagggggtagcacgctcatcttcctctccagtaataacaaaagtcaggatcgtaaggacagctgggtgctgtggctgatgcctgtaatctcaacacttcgggaggccgaggcaagaggattgcttgaggccaggggttcaagactagcctgggaaacagaggaagactctgtctcagaaacaacaacaaaattagccagacatggtggtgtatgcctatagtcccagctatttgggaagctgaggcaggaggatcactggagcatgggagttcgaggctacagtgagctgtgatggtgtcgctgtactccatcccaggcaacagagtaagaccctgtctcaaagaaataatataataaaataagaccaaaataatcttgaaaaaatgaaataaaaatgaatgctgcatgtagaaacttggaaaaataaaataaaaaagacagtaaggatggagaggctcttcaaaggaaagatgaatggagtgttaaaattacttggctgaagaaatagcaggaaagaggcagagctgcccccgtggtcctggctgggaaaagggaagggtggaagagactctgatagaaacacaaggctagaagcagagtccgtctgaaagacttagatggtgagctagtttagctgcaggtattttgacattaagatgaaaataaagcgcttgcctacaatgaagaaaccaaacacccacctcaaccaatgaatcatatccttcaggacatatacccctggtgcctttagatataaccaacactaggttcaactcttctctggatccatatacctgtcaggcatgtggaaggaccattaatagactgtagcaatctctctacccactggctcacatcagggatgtactgaccactctgcttatgctggaccacaccaaacccaggcaacactaagccatgcaaagtcatacatagaatctcccatatcctaaagacgaagcccataatatattcttgcaactctgcattccagagtccccttcccccacatgtatagtatgcttatagtagtcccttaagcataaagttgtacagaccctaacatggtagtatttgtacatcacctccgtgccttgctctagcactcagagttctagtacaggcatcaagggtgtctgctgcaagcatgcaccagagggctaacgccccaggacagccctccactccaccagtagcagataggagttgatggattcatacccagccatttcctcccttacttggaacaactcaggatttttttacattcccagagctcccagctgccaggcaaagcaatctgctcattcaatgtgttctgtatcagtctccttcccttcccttcttctctcgggctagatgggattaaggcctaaagaccacctatgttagccagagttctccagagaaacagagtcaatgggatgtgtatacacacactgcataacaacattttggtcaacgatggaccacatctaccatggtgctcctataagataaaaatatagctgaaaattttctatcgctcagtgatgtcttagccatcatgactgtcaataacatctgatatggtttggctgtgtccccatccaaatctagaattgtagctcccataattccctgtgtcatcagagggacccagtgggaggtaattgaatcatgggggcaggtctttcccgtgctgttctcatgatggtgaataaatccatgagatctgatggttccataaaggggatgttcccctgcacatgttctctcttgcctgccactatgtaagacatttctttcaccttctcctatgattgtgaggcctcctcaatcatgtgaaactgagtccattaaacctctttttctttataaattacccagtctcggatatgtctttatcagtgcgcaaaaacgggctaatacaacatcatagcagaatgcactatgtttaaatttgtttagataacacaagtacttatcactgcattacagttgcctgtagtattcagtacagtaatatgctcacagatttgtagcctgagagaaataggctacaccgtatagtctaggcgtgtagtaggccataccatgtaggtttgtgtatgtacgctatgaggttcacacaatgacataatcacctaaggatgcatttctcagaaagtatccccatggttaagcaatgcatgattgtatatggagagccaaattcacttaaaggaattggttcacatgattttggaggctggcaagtccaaaatctgctggttaggcctgcaggctggagacccacccaaggaaggaccagtgatgctgttccagttggaaggttgtctgctgcagaattctctcttgctcaggggaggtcagtcttttgttctattcagactttcaaataactggatgcccactttatggagggcaattagctttactcaaagtctactgatataaatgttactttcatccaaaaacatccataacaattttcactaaatatttgggcaccgtggcccagccaagttgacacataaaattaaccatcatacctccattccccatcccctaccagtgtgtcctgcaaccaccactgaaagaaacaacttgcactctaattcttgtaacagtgtctgcttctgggggaacctaatttaaaacgttgtatttttagtatactgtgacttggaaaataaatgaaagcatagaaatgcttagtcctctttcaaaaacctagtgacccatgaaagcacttggcccacagtttgggaaccactgcattgcaggtgctggagtttaatgcctagaaaggcccacgcaatctctaaggccatgtaaacacagatgtttccaaagtcgttgatcatgattttggaaagacctcagcattcctaatagtgacacagatattaggatggtgctgtcaaagaagtccctctctattccattgcatgcccgaccttccagacagttagcaacgttctgagaggttaaagactcttatctgaaacccatcacgtcaccaaagcagcaacgatttcatttaaaaacaacacctctatccaaaggctcagaatctgttcacaaaagaaaacacatcttttgacatgcctaaaaatacatgattatatcctttgtggcaagatgagaccaagtgactcattgaagtcataaaggctgcaaattgcagtattgttgtctttgaatgaaaattgccagaggacttgtgtttcgttgtctcaagaaacctaggcagtcatttgccgcatcaggagatccaaatcatctgaagttgaagatcatctcctcctttttgtatttcattagccaagatcaggttaataaaaagtttaaaagttgactgccttccccaggagatttatttagacctcctctgaggggatgagctgggaatggcagcctacactctcatttctccagagctcactctgtcttctccctctgtggtccctgaagtctgccaattaaagacctcctcgatgacattctgctgctgaagttatgcacacataaatcactgtaataggagaagattgttatgttaacctccaccatgcaacccttttccttttgtgagaaatgtgaaaaacattcatttgtctggcacaaaggaagctatttcccaacagatgcctggaagccttgcctggatgatgccccttcctgtggttacgtaggtggtgcctcctgcaccagcaggcattactcaactcgaaacgcagagcaacgaggccataaaccaggcagcattacgtcagagacagggtgctctgaaataaatggggagctggttctatctagaggaacatttttccatgtttaaccaagcaaaactggagacattactgaacacacagtctcaaaggtcaattcttaaggagaccagtgctggggagggaagacacagtttctacagctatggaggaacccttgaggtggctggagtttcactgttagaacgaggggctggtgtgcagcgactgtgaattctactttgatgcgaaagattgcatcttctggttgagcccctgggagtggcaaccatagcagccatggggctgaacctggaggtggtcaccactgtgtgcttcctcacctgcactgcaaatcttcatgggttcaaattccccagagattcagttttcaaaagagagacagacagagagagagagagagagagagagaatgttttatcaacaacagaatacatattcatgacgcattaatgacttatatctacatgttaactttagaagataatattaattgaaagacttgaaaaggaaaagtctgggcatgagctgagctgtttctctctatattcagttgcccccagttagctgactcaaggctggggtgcccccaggggatggcgaggggggacctgctatgcagatacagcccctcatccagaaactggcttgctttggacaccaaagtggggacaccaaacttgatcaaaggactcatttgcccacccctaaagacctgattttcagagctgctatcaaagggcagccaccttgcagggcaagcccacagcgaaagaaaggaagaaagaaggaaagaaggaaagaaagaaagaaagaaagaaagaaagaaagaaagaaagaaagaaagaaagaaagaaagaaagaaagaaagaaagaaagaaagaaagaaagaaagaaagaaagaaagaaagagagagagaaagaaagaaagaaagaaagaaagaaagagaaagagagaaagaaagaaaagaaagagagaaagaaagaaagaaagaaagaaagaaagaaggaaagaaagaaaaagaaagagaagaaagaaagagagagaaagaaggagagaaggagagaaggggagaagggaaggaagggaaggaagggaagggagggaaggaagggaaggaagaaagagaaatgacagtggctcacgcctataattcaagcaccttgggaggctgaggtagaaggattacttgagcccaggagttccagaccagcctgagcaacatagtgagtccctctctctacaaaacaaacaaaaaaattagccgggtatagtagtgcacacctgtggtcccaggtatttgagaagctgaggggggaggatcacttgagcccaggatttggaggctgcaatgagctatagtcacgacactgcactccagcctgggagacagagcaagaccctgtctcttaaaaaaataatctagttagaggggttggtagggagggaacaggacacaatttctcttattacttatttcacaatcaaaatgaaatttcattctagttcacactacagcaattcacttgctgttggaattttgacatattctgtaaagagtgtccaaaaataaccagttgtacctgattctgttgaactctctgcacctgtccattttaaatctcattttcttatttgctgttttttctcccccttcaaacttacaggtgtaaggtgctttgtttttctgcttttctttttttttttttttttttttttgagacagggtctcactctatcacccaacctggagtgcatggcatgatctcagctcactgtaacctccacctcctgggttcaagtgatccttttgcctcagcctcccaagtacctgaaattacaggtgtgcaccgccatgcccagctaatttttgtatttttagtggagatggggttttatcatgttggccaggctggtctcgaactcctgatctcaggtgatctgcccacctcggcctcccaaagtgctgggattacatgcataagccaccatgcctggccagatgcttttctccttaacctagagtgaccagccatcctggttttcctgggactgaggactttcccaggacagggggctttcagtgcttaaaccagtcccttgcaagccatagagttatttgccttctttaagtaaacatgtaaatcttagtttgagcctaccaaaccatgatcaattaaacacagtatattagtcctttctcacactgctataaagatactacctgagactgggtgacataaacaaaagagttgactgaaagttctgcatggctggagagacctcaggaaacttacaatgatggtggaaggcgaaagggaagcttgcacgtcttacaaggcagcaggaagagagaaagaatgagaatgaggaagtgccacactttaaaaccaccagctctcatgagaactcactcagtatcatgagaatagcatgggagaaaccacccccatgatccaatcacctcccaccaggtccctccctccacatgtggggattataatttgagatgagatttgggtggggacaaagaactaaaccatatcacacagtttcacggttttgcagtagcagatatacaagtacattcaccaggctgtgggaaactggccctatgggtttctgagcagaagtgagaccacgtccatcattgctgagaacgatttccacttcatactgcaggaagaagactgaaggttttcagaggctattgcacaattcaaagcataaaacaataaggggttaagtgaggggaatggaaaacaaggggcagggtaagcagacccttctccacggaggtcttgcaaattgttccaatccagtcatttatacagtcttcaccagttacccgcaggccccatcaaaagcaacatttcacctgaggagccaacatggggtgccacctcctccctggcacatgtggccagagcatcatctcactgtggtccttttattttgaagtaaaatatataggaacaattaaaaaggatggaaccaatgcatctcgacattctctttacaggcaaaaagaaaaaaaaaaaaaccaaattaggcttttgttaccctgacagcactgagaatcatctggcttgtgagcttttaaatactcagcgtataatgaacatctccagccagatccagtgggcatcactcgtggagactggccacagggtacgcccacatctcccttgccttcttctaggctttcaaagggagcctgtgatgcctacatatgaattgcactgaattgctcttgattaaatcactgtaatttttttgttactctatgctttacattaatattagttgaatacccaagggttttttttttccactaatcccaggtccaaattacacttttctcatccagaagtgttgggaagatggaaaataaaaataacgagtatgaggaagaagaagagaaatcgctgatactgagaggttttgctaagcacctggcattttgctgagtgcttctcatgttacgttgtgctctgtgaaactgccattttcatgggtcccatttttatactgtttgacccactacattgtctcctatcatcctcacagcaagtgaaccaatactgtcatcgccctctttttacacgtgggtacactgaggctggagaagagtgtggtccaagcatgtggttgagtccagctgtcccagctctgactccagagactgtgctgctagctgatacccttgagtgccctgccctgacccagttccccagtcttttttcttttcccttcttccccaacctctactctgagctgtaggctgctgatgagagaggacaaacaaataagatggacaagatggtaccaaatccagagtcatgtggacaaggggacggcgtggattgagtggctggggcagttgtaacttcatgctgctgggattggaagccagagcttattgaaggcaagtgcacgtggacattcccagcagaggaggggcagagctcccagggaaccacaaaagcacccacgtggaggggctgaggatgtggcctgggaaggatgccatgtgaccacgtttcctctctgttttccaggccaccgtggctgaccacccaagcatccgagtcaataagtctttcactgagaaagacctgatgccccgcacaatctcgccccaactgggagggttggcacaggctttgtcttctccttgcacttactaaagtttatttaacagtttggaccttgcctgttgaatcttgaaaatatcacaactatgcatatactgtgttctgaagagcttacccgaacactatttattagtcactttgatctaattcatcacatgcaaaaatctcaaacaagcactaagtgtcctttcaaggggacgtgttaacgtagttaaagtatgcctaagcctctgtttcccacggctcgggcaacgggtgccatgggttcaaaaatgcaattaaaagaagactgtcaacttcatcattgtcaaaacgccacatcacccgctaaaaaagaggcgcccccttcgtcaatttccccatccatgccaaagttttggagagacccttcactttataaatcaactcacagcttagaacatcctggcagccccttcaaggaaccgatcggaatgacagggaaagagaggataaccatcatagcttgactggatacaggtgtttgcgtttacagacgaaccacaaacgcctggatctttgacaggcgttgatgctatcagtgaatcgcagctattattggctccggtcaccaagggctcgggggcctttcccttagcaacatctctgaggctgataacatttggctgaacttttcagattttaacctcccttctgactttctgcagtcaaacccgcctaaactgatcagaagaagagacacgcagtgggaagacaagtaaaatattattgactggactgtttcatgtctattaggaagaaagagcagaggggggagggagaacctcacggtctgacaggcgtcaagataatcaggggaggaatcggggctgctcagtaaccctcagtgaggttggaaagcactggcttacaagaggtcattgttctgcgcggggaacaaacagggcgccaggcaaacaagggcgcaattgcattcctctacgggaccccgttccttgtcagcaggccctgctcctgcagcaaagcataggatgggaaacaaaaacaggaagtcgcgtggctcaaggaagaggcaggggctccgcatcctcatccaacggctttggtttctggaagcagcaggatgtgctgaccctatatgcaccctggtgcgtggggcctttgtgctgggcagaggtgggacccagagggacaggcgatgctgctctggaaggatttggctttggcaattggtattttcttgtgtgtgtgtgtgtgtgtgtgtgtgtgtgtgtgatttatttttaaattttagattcaggggatgcctgtgcctgtttattacacgagtatattgcatactggtgagaattgggcttctagtgtatccattacccgaacagtgaacattatccctgatgggaaatttttcaacaactgcctcactcgcactctactcccttttgaaatccccagtgtctattatctccattttatgtccgtgtgttcccactgattagctcccacttataagtgagaacacacggtgtttagttctctgttcctgcattaattcacataggataatggcctccagcagcatccatgttgctgcaaaaggcataacttcattcttttatatggctgtgtaatattccatggtgtgtatgtaccacattttctttatccagtcaactgttgatgggcactaaggctgcttccacaactttgttattgtgaatagtgctgtaatgaatatattatataataatatatgtagtgctgtaatgaatgcaagtatacattataatgattaatatatacttgatgaataatataatgatttctttcctttgggtagatatccagtagtgagattgcaggttaaatggtagttctgttatttctttgagaaatctccatactgttttccgtagaggtggaactaatttacattcccaacaacaatatataagcattcccttttgttcacatccatgccaacatctgttagtttttgactttttagtgatagccgttctgactggtgttggatgatatctcattgaggcaactggtattttcaatttgcatttcacttccctgctccttgttctgctgttcctgacggacctccttgcttcttcaagttcacgtcctcagcctcctggctgtgcatgcccaggctcaggtgtgcatgttggggagcagctagaagggctccgcttcctctcagtgaccttaagtccagttgccaagacctcctgggactccacaaatgggttgatgatacaagacatgcttccccctgcccccaaacctactggagaggacaacaaaccccacttgctaaccagtttgcaagaccgagcttgccatctgaagcagaggtcaaggtattcagcactgataaagaaagctggaacagtgaggccatgccctgccctgcctctcctttcctccctggaccactttcatttttactcgccccttggttctgtcaggtaaaaccaaccacagacactgctcaaggaggtcccagaaaacctatggaacattccccaccatcctttgggtacaattcgccttggagccatctctctttgaggactgggcttatttcccccaaacatgtttccactctgtattccagcagccctgatctgtgcaaatggtttgctcacggccatccaagaagcaccatccttttgttaggggaagcacctgatgcccatagaaccgtgtgacttgtccacttgagcttctcaccactcagggtgagagggtggggtggcatttcagaaaaacatcaggaaagggagacttggaatcagagaatggcagtacagaaaggaactaaaacatcaccttctccaattatttatgccacatgtggggaaactgaggcacagggcaaagaagaaagaaacccttgggtttacacatggtaaactcccctgcggcccgtccctgcctcaccgcatggcccggctttgcagtgcattcaggcatgcgggtccatccatgctccagacacgcccagggtaggccccacctgcaggggcactcgctgtctccctcacagctgaccaggctctaccgcagaccttcagctgggcctagatcagaaacctggagccaaacaagctcccatctccgtaacacatgcagttggggggcctgcaatgcttcctccccacacccggcccctaaacttactcttatttccatctcttactgtggtcttgcgtgtcctctttcctaattcttcccctgttaatcaccctcccactccctgccacagagccttctagaaccctggttctatgacattatgatgatgatgacaacgatgacgatagtggcaatcatttattaagcattgccctggcctaagacaccacatgggtcatttcttccaggctccaacttgcttctgctttgccatatggtaacacgccgtattatggaagcaccatcattaccgccatttgcaggggaagcctaaagaggtgaagtatctcgctcaatctcatgcaagaaagccaggattcgagcctgcgagctcttccacttcagccaccctcgcccagcattgtcccagaatagtgtcgtcaccacagggtggagggacgggtctcagaactctaacatccccatgtccgcccctcgaccacagccgcctttcctgccagtcttcagacacctggttttcttcccagagacctgcagaacagtgatgccagccccttgccccttgcatcagtccctcctggcagctcctccctcccatgcagcccagaacccacactggttcataagaacacactggtctcagctgggcactcagttatcccacatctcttccttgtccttaaacctacagagattgcgccctgctcacccctcctcctcccacccatgtggctgggagctaatggtaagaatctcgccactgtgtagcactgcatgtgggcccccatctccactgcaccctaggtccctccatcagggctttctgcctctgttttcagcttcctctttcattcctcccagtgctcttgtgacctcatccttccacctacaaatttagcaacattcatggcgacgccttcctgccagtctcaccagccactgaagaccaaccttccctccttgctctttcctgttgcccatggtcctctgtctcctccactctgttctccccaccaccaacagctaaagcactcctaccataaaccaacaaactaaccacccttaacatgatgacctcctccctctcactcagtccagtcatcagtgaccttcccataggcagatctcagacacccactcctcagtccttgtgtggctgaacatctctgctgtgttcatcaccactgaacactcctgccatcttgaaactatctacccccttggcctcgggttttcttccttcctccatgaccactccagctcatttccacccatggctccctcgttcttgacctgtccctggttggtggtggtccccaggcttccactgacaacctgccccgttttcctctgccatagctttacctgccaccccaggtgctaactcaagctcttcccaaagattttggcttagctccaaactggctggatatctccagttgccttcggcaaaagaatatgttcatgacaagggcccactctcttgctccccaaggtgatttgatagtgtggtttcggattacagcctggcttcctggggtgatccatcacaagaataaagagtactgataaggccaatgggtgcacttccatgtcaggatggttgtgtttctctcggcaaatgaatgggtagtttccccagcacctgcaggtggtgagagttggtctcagctctgataacacaggctctgccaaaggtgtgcccttgggctttgggggatggaacggagtcagtgatagtgtgtggtggtgtccatctgtccttgctcaaagccgatctccacctgcacctgttctgaaccctagctctggatgaagagagcagttgagtgttgatgaatggacagagccagcccccagctcttctgggctcactgtttgtgggggacttatgggcatgcttgagccatagggtggttgcaccccggcccacagggcaggatccccatccacattcacctcactagaaatgaggcagcccttactgtgtgaaatgtcacagcgtgggggagtggcggtaggcagccactgggaagaagcaccctcctcaagcgggtttgatgtttctttaactctcaaaactgctgcccatggtttacaaggtcatgaacaggaaatgacacacagcacatgcctctcatggcagcacctcctggatactccatctggacctgaaaatgcagaaggaacagggggaggaagtctaaccgggaagccgcctttcagatgcccactctgtcactcactcactgcgtgaccttgggacagtgaccagctcttccgaagctcaggatgcttatctattggacatttactacaatcccaccctgacttctcaccaggttgactcaaggttctcctgtggttaccctcagagctgtcatgagtgagcccagaggatgacggagccagtaggggtagtgtcttcacaatcctcaccctggcagtcccgatgtggtcccctctgctgatcccccatccatgacaggctccttctcatccaacaggctttagcccaggagtcaccgcctcagagtggacttcccaccactcattccagtgcagccgccaactcaaggcactttctaaatgatgcctctgttctgttttttgaagaaagtctcaaacttaccttccagggaaactgaccaaaccaagaaatgctgaccctaagtccctcctggagccaagatcagtgaattcctacatggatcagatgacgtggcctcttctttgagcttctctccaatgctaatcttctagttatcaccaactagaggttttttaatttatgtattacatttcttgcttgttatctggtggtctgcaaggtataggtgtatcttagccactgaagtagaacctgactggctcatagtaggtcctcaataaatattgactgaatagctaatgaggggatgattgagtggacatcccctgtccgaggctcggatacctggacttgatagaccctggttcccaggtctcagtgggttctgcctcttgtcgcctcctttgccagccacttcctcaatgatggagagagccgaggttcccctgctggatgcattttccgtgaatttggggaacacaagacactgtcaagcccacagtgagctctgagccctttcaggagagccaacccttgatacagtcccccaggtacccctgtgagtttttctcctataaaaaatgagaaatctgtagctgggtgcaatggctcatgtctgtaatcccagcattttgggaggctgaggtgggtggatcacttaaggccacgagctcaagaccagcctacccaacatggcaaaaccccatctctactaaaaatacaaaaatttaccagatatgatggcacatgcctataatcccagctactcaggaggctgaggcataagaattgcttgaacccaggaagcagaggttgcagtgagctgagatcgcaccactgcagccactacactccagcctaggtgacagagtgaaactttgtctcagaaaagagaggatcttccattgtaaacatgaccagaccttacccaagaaagaaattccttttgatgcctttttaagcagtgtactcaactaccaaacagagctgggacttccgtccttcccaagccactcctgtagagcagagacaggcacctgtctcttcataagcccttctttctctatagtctgatttgatttgacctgtgcgataactcctatctgtgtctggtatcatcactcgtgtctccgaacatttcacagcagtgactgatgcccagacctccggctagatggtagccctgactgtctgttatctgtgcacctggtcagcctctctccacttggactccagcctcttgagggactaagcttgcaacacctcacatcaaatagaccaacgagccaccttgtttggctgaaatatatgttcattctacaatttggccatcaggggaaggtaagaaagaagagaggcagaaaaacagacgaaatgaaagggaaaagacacacacccagcagcagagaaaagacataggaaaaagaaaaaaaaaaccagtttaagggagaggggaaaatgaatcatatacagaagcaaaagaagattaaggggagaaattctctaagatctgctgtctataaaggagtgacggacatgaggtgaggattatacggtgctgtccacttggcacaaagggtgcaaagtcctaacatccccctgccacctgcatttcccactacaccatgctatgaatgagtctccattccagctcaaacatccctgcaagctcaaaagtagaaaacttgtcctcagatgcaacaactgttgtcagagcaatgttaccctgagttgtgaagaaacctaggtctgcatggaagaaacctgggctgccccagtccctggccaaaggtttgccaagcaccctcagaagacctgcaattgtcaggggaagtgaacttggtcccccgtcccccaaatccctgcccgttctcattgcttcatagtccagtgcagtccccgacccagacccaggcctcccgagaagccggtgaggtgaagtcattggagggagcctcatccctgatgggtgggcacagggcctgtctgacttgcccactcatatcactcagaaatctgaggaggtggtgcttgaggggcagtagaatgaggctccaagaagtcactctcatctctgtgggccacgccagagttcaagactggatcttcgctccaatggccgagggatctctggaaggtcccctttgccaccaaaagcctgcccttttctgcatgttttgaaaggagttttcctaaacacagcctcctccatcaggaagtttgaatgtataaacagtgactcttattcagaaaagcagcgacgagcagttttatgtaaaagttacatctccatttaagaaagaatatataattccacattccactgtccctcgaactttattcccatttatgtagatcttaatacagttatatagtcgcggggctaatgtcccctccggatggtaatgaggtcctctcgaacccgttagctgctataaagtatgcagaagttaaacgcacagatggaaaaaaatttgtctcaattttatacttctgcaaaatggtaattttgtacttaaaatgtacaagatggatgttcagaaatataggctgatagcctaaattatatttggtcataatttatgtagtacagtcccaaagagatacaaaaaggcagagcataatttatctgctggaatcagcgatagctttgctaaaactcccatttattccatcccccatagttttaagcagccttcgtcctcagggctcactctatttaagttttccatactgctgtttgatcacatattgtactctataatttgcctatcatctgaagcaaatttaggtcccagaagttatgatctctacatagcaaccactttatttggtaaatgcaaaatatttatagcaatataaaaaccagatgaaaataaaattcctataatcattggaacatacacactttatcattggggcttgtaagaccattagagtaagactagtatgttgactaatacaattacctttggacgctcactcgaatttgctgatgcttgggaactggagaaactttttctccagcatcccttccatcttgccaatggtgaaaaaacaaaacaaaacaaaacatctgggcacgggctccagagagaattgccccagaggaaatgagttgaaaagcgaaagtcagataagtcatcactgtgcctcagatgtggaaaggaatttccaagtaaaaacacactgcttggcaatggcactgccctggatgggttcacctcttaccttccagggaaactgaccaaaccaaggaatgctgaccctaagtccctcctggagccgagatcagtgaattcctacacgaatcggatgacacggcctcttctttgagcctctctccaatgctagtcttctcacacctctaacttctttgtgtgtgtttgtgtgtctgtgcttccaaaattgttacttggagatgttcaggctggaacctacaacatgacacagtccatcaacgctcctcgcaaagcaacgagctcttcaaaacagagtggagagagaaaacagggaagggacaggccccaaactgaaatgtgcacatgaaaacctgagggaataacgttactatgcatattcacatacacttgttgagtgtctgttctctgcaagcactgtctaggacagaatgctattaggacagaatgctgttcaaataagtgttcaggtgactttcgcttatgcataggaccctgccctaggttctttctagtcctcagaaaaaccctgcacagtagggcttacagattaccagtattagaaggaggaaattggccaagggtggtggctcacacctgtaatcccaacactttgggaagccaaggcaggcggatcacctgaggtcaggagtttgagaccagcctggccaacatggtgaaaccctgtctctactaaaaatacaaaaattaaccaggcgtggtggcaagtgcctgtaatcccagctactggggaggttgaggcaggagaatagcttgaacctgggaggctgaggttgcagtgagcccagatcacaccactgcactccagtctgggtgacagagggagacttcttctcaaaaaaaaaaaaaaaaaaaaaaaaaaaaaaacaaggaggaaactgacggagggagaggtcacccagtcaagtaagtggtagaggagagagtgacacctaggactgacaccattcaagccagctgtatctgataccaaacaagccccctgttgtacttttctgtatgccaacacagaacaccaagcttcccgaagtgcctatgcagggatattgcttctctgtcttcagacctctccccgcccacctcaacccccttccatccgccctcaaggttgccttcagctgagtgaagatgaaataaaaccccagctgcatctctctgataaaaacttcaactgaagcctcatatattttgtagatactaaagatctcatggctctttgaagacgagtgttgtattaatcattgtggttgttcagattatttcctcatttttaacattgctcgagccctctaccacagagccaccatttctgtgtccagggtagtgaggccctaagagataccctagattcctctttatagccacttcctccttcattgcaacttagctccagctccagctccctaagtctaagggaatctccccatttttaacttttttacccaaaacatgcttaagcagaaatcaactgaatgcatatttgaatagcattctgttctaatccaaatattattctacaaggtccattttaaagtctgttttttcatatatcacactggagggagagagagaaagaatatagctcaaaataaatgtgtaaaaaaaaacgaaagagatcataagggcagaggaaataacttggtctaatttatctcctgattctataattatttcaaaaccaaatacaggttcctaaagtatcagtgtggaaaggagccctaatgcaccagaactgctcattccacaactggggaaactgaggctcataagagaagtcttacatacaccagtaaggagaacagctaggtctctatttgggtcttgctcggtagcatgtgaacaatgtgtctgttctcaaaaggcagtaactattgcaatcagttgggaactcaagaatatctgacatatgggaccatccatgacttgtctccagtcctcttatagcctgtgggcagggagatgggtttcatttgcctattgtctgttcatcagcactcctccccatgcaagggtagaggaagcaagagggtatgttgacttttatcaagagcctgcaggctgggcatttagtttgagctttctccctctaccttcaggcaatcctatgcatggctccaacgtgcaggtgaggctcagtcaagggcagtcattttcccaaggacacacacaaccaagcccaataattgataatactactgtacaggttacttcagagaaaggaactattaatgttgccttggggagtaggaaacaacattctagttgaatcttctaggacgggatggtatttgcatgcagaggacaatttgtgggcagaggtgctaaggtcccagtaaatatttaggatggtgtttgcacacagaggacaatttgtgcacagagctcctaagacccctgtaaatatttgctccatgttcacagtccaaggagggagaaaacgtgcaaaggccctgaagagagaggctttaaaaacccacaggaagctctttccaagtgttgcaaagggaatggttgttcatccttttcttaggaatcgttcaacctagccctgcctcccagccaccctgcagccaggagctctgatgtgtgatattatatagagttcaggaatgtgaaaggcaccacataaaatcaaattctcttctattttaagttgagtggtgcatcagttcagctttaaaacctgatttcttaaaagtttcaaagggaaaaaaaatgttcctttgcaattggaatcgagtccacataaattagcaggccagctctacatatccatctttccgaactttcctggattgttcattttaatcaagcggcccacattcttgacttttcatccttcactgcccagaatgatgcactgcagctactgatgacacgcaaatgttaattttgttcaagttcaaacatcatccaaaaagggcctattttaaagactgctttgcaaacaccagctgaaaatgaggatgaaccgaatcaaacaccgccaagaaattcagaggagggaaagctgtggtcttaaggaaactcacaagtttttttttctctagatcctcaacctctccaaggccgagagtagaatccttgatgtctagagctggaagggaaatcagatttcaccccagccctgcccaaggtcattcagtgtggtagggaagggacgagataattcaactcttcccctgggtaaaagagccttcctaaaatgtgaaaccagtgaaaccatgtatttcaagtctttctgtcatttagtaggtttcaggagcagcaggatacatcacacacacacacacacaggcacaggcacacaacaggtttattttagaactctggctcaccccttaaccaactaccacttcctctatcccgtcttcttcagtataggatgtcactattgcccagtgagggcacaagagtgacagttgttcagagatgcttcaacaggaatcgtgcacttgaataaggagaaatcagccaagttcctatttcttcatggctgaaattgtctgagatttggcatctgcttttttgcctttgcacccaatgaagctgcatgagaaaaggacatcatctgtatgagtcactaccgcatccccctggagcctaaaacagggccttggtgcctcgtgagcacccaatgaatatttctgaacaaatgaagaaatgaaatcactctggtctattatttaccaggatccttcaaagcaggacagtactatggaaggtctcagcatagaggttagagatctgagggtccctaagtcgttgagcgccatctcacagcaacatggccctagagaataaatccatctgaaagctttggccccagggatctcaacggccttgcctctagaataccagcctcatgtaaacaagccatcggcagtgacaagtaccagtttccatggcccatcagactaaactgttcacagtggcggcccatcttctgaaagaacagaaaagacactgcaacgtcaagaaaaaaatgactgccgctattccctgagcgataacagccgctcttgaaatgcaggacatgtttcatttggcttataataattgtgtactgtcttttaaccctcaaagtgttaagcattgtcatatcctctggggatgaaaagatctggggttaacaactttctcttttaaaaattcataaaggtgcaaataaacagcattgcatccagtggctatgcattgcaagaagccaagggagaaagaggaaaaaaaaagaccacaacaacaacattaccccccacaggatacttggcaattaactgcagctatgtcagcaattttttgaaaaatttcctaaacatggagaagactcatcctcaccatatgaaaaacaaagctactgcagtgactctcccatgcattacaatgtgtgtgtcttacttcttaaccaagccgctaatcacgcaaattattgcaactaattacatttgaaggtctaattaattctttcagtaccacatcatttagtacgcattcacaacacagcacctgttttgaaaatccttgcagttaatttgtttataaacaaacactatttgcataaaatgtttaatgaatggtttaacagttagtacaatactccagttttgtcttcgtagatctgaggtcatcaaaggccacgataaattaattttaaactatacaaattaatttaaatagaatgtgtgaatttctcattaataaagaaaacattttcaacatgttaattaatatctctgtaacaggctaattgcttcctgcacaacaagtacatcttacaagcaaaccttaaagatttggggggcaaaggggtggggactattttaaaactgcaaaacaaaaagtgcaattcagaaaaaacacacacagcccgattatactggagaattcaccacttaggacaggcaaaccaagaaaggaagctgttgccttatgttacaaatacaacacattttagtcatcgagaacgggacggttgaaaaacatttctatcacaggtgcagttacgctgcaaagatggttagatgatgtctgccttctggtagaaagacagaattaatgaaaatattagttctgagagtgaagatctctcctttgaatgtagggcatattagctgtgtttgtaacccaatggtaaatacggatttcattaaacaaatctgcatcttcacaccagtgtctgaggctcagccatcataattctccctgtggcaaaccatggaaagatacttcacgtagaaactaaagaggaacaacattatagcccaacatcaagcacagcccttgcaaaagccgtcactgagatatgttcgcccttaagtttgtttccgatttgcaagcgttttcacatttgataagcacctgttgtaaatttacatccacgcaggaagtattcttatgctagggagctgagaattgtaaagcatgtttatactcttacccttttgtggtgttgccccttaatgcacaggctgataaaatgactagctacacaggacccagagggatgtgccgctccacctggttcccgccgcatcttcccccgaggagccactagtcccttcctcctggaacaggttctgtcagcactgatcaacaagcacttggtttttgttttaagtttgttaatttggagaggacatggagagacagggagcgagggagagagagagagagtgtgtatgttcagggtgtgggggtagaacgacagaaagacaaagagaagcacaaatacagacttcccaacacttttctgggacctgccaatgtatttccaagaaaacaatggaaaaacagtaggagttccatcctgatagcaccaggggaaaagaagaatttgcccaacctctgattggacccagatttccagggtggtgctgctactcgtcagaaaacacttggccacatggccccttggtcctgatatttctttggaggtgtatatagaataagactatcccaagcaccctgctcccaaactaccctggtgaacccagtatggtgtgaaaacccctttgctttgctcttttgccagataaatgccagccagcatccctgtctctggggccctggagaggccttcaacacacctggcctcactgccctgtggcttcaacaaagaggccgagcatctcctataaaccttgaggtccatggatgacatagcggaatgatggatttcagaaaaggcaggtgcttcccactctttaaatttttgtttattctttccaagtttcccatcaacagccctgcagtaaaaattcagggcttcagagacaaatatttcatgagtacagactgtgatgaggaaaagcaagccattccctctctatcaggatccagaggtaagctgctgctttgctcttaaaacgcaagaaaaaaaaagtgattaacggttggcacaggactcaggattatacgccatttccatgttgacttctttttggaaaagatactcaggatagccatgtgaggagttactccgggtttcggccccatagccagctagaactgaggttcaaggggcagagggtgaactccccagcagagacagaacggggcaggaggggggcaggaggagggcaggaggcgggtggctgtcagacaaaatgcttccatcccagaacaagcagaaacaggcgcaccactctgcaatataaaagtcagaaagccttgcaacctagatgcaacccagggacttcccccttgcagccagcagccaaggcagcttctaggcactgtgtggctgtatttaaacccaacttggtccctaacttctctccaaagccggtcaagttgccccaccctaagcatccagatgacaggctcctgcctcccctcttgcacaaaatcattcccggatgtagagcctggctttttctctttacccattaaaaatcaccagcgttttgcaaataaaggcgatcaccatgtgaaaaattatcttttaaaatggagtttaatttgcatataaggaacgagagatttatgacaagcaacatcgtccagtactgcatctgcctagtatcagtcgtaatttagattgtttgtgactgatcttaaattctaaagcttggagaagatgaagtactctgttgctgtattattgtcaggagtctaagacttaccagagatttattagtaatcttatcacaaacatgtctcaagtttttgcttttaatatgtgccaagctcctctgaggaattttcctcactgcaattatattcctcaatgcctgcattctgaagctgagttgatttccttcccaaaataaagcgacctatcattacaccacagccgctcttgtacatttttcctctgctacttaataatcaatgtattcatcattaaaatctgagccctgaagcaatggtttttagcatattctaatgactagcgacttgcaaattacaatgacctttcatgtacattctgtaagcaccttgttctaatgtgtactgtatttatagtttgccaatacaaactagccaaagattggataattactgtaatctattagctcgattgctttccctgctcatttatagcatgtgccacgcaggccattttcaaaaactggcctatctttcatctcccgcaagctcagaaagtaagggatacttcatcttcacaatatacacacttacaaatgtctgaagaacagcccgtctcagctcaaggaggtttcaaaaataaagaaccttctttcctattagtgtcataatgctatttgtgactgacaaaaaacaccgctccgagaatgtaaactttcattgaagaatgtcaaggccagtcccattttctgcccattactctgacctccaaatagcatttaataagatctgctttgaaagaaaaagataaaggcacttcccttaaacaagaaacaattttttttgttataagtaaatgtttcaagtgaaatattaaactttttcttttcttctttttcttttttttttttttttttaagcacactgctgttacgactccagaaccgataaggaagctatgtgtggaagtatgagctcaggtcgccttctgaccctctgtgacggtctatttcaggcagttatggatagataacattacagacactggtaattaaaacaacactaattttgtctctgtggtcacgctttgttgttagaagccatctatcatggccttcacgcatcacgcaatgagaagacatttgtctacgtacattgtgcttggtcaacggttttacggatttccccgcgtacctggacacccaggcacttttaaagacgtactgccttcatttctactctattactctgattaataaaacattttgcatgcttcatcaaaacaccctgcaagcttttcaccacatatattcatggggggggaagcaatgttaatttctttcccttttagaaagaaactaacaacaacaacaacaaaagaaattctcttttggattggaagagagaaagaaaaattcaaatatggaaatatttgtcttccctgtaaaacagagtccagcctaatgaaaagcataatattaaaacacacacacaatgccaagcatctcctttaaggctacacgtatttttgactatatgtatcgttagttcttttctgtgcattcatttgcttgatttatggacactcaatttcacttcaccttttattacaagatctacagttacattaagagtaatagcaagtcaaatgtttttatatttgggcaattaaaaaaaaagaaaagatctattccttgggcccttataagaaattagggatagctgaaatgcaagatgactagtttagttctgttgtaatcaactaagaagaaactgtaatggtgcatttcaagggatctttaacaagtgacacaaacaagagaagaagcagacaggaccatttaacttcaaactccaccgaagagagctgaattgtaagcttcctacagcaagcccggctggcggctatgtggcagtcttcatttctcagcggaaaagccactcccttgagactctccaggcaccccccaaccgcattttttatcaagtgtctaaaaggtaggagctgttagaattcttttctctattcacagatgatcacagcccttttttcccctttagcttgcagacgcacatgtagtttcaaatattagctagaactccagccctcaccagcccctaattgctctctcagggaaggtatcataaactcaggtatggctgacacagatgtagcttcaactttatgcaggcaggaatgctacatcaaagctatttgcaaagtgacatagctagttgtttaaaagaacatttttattatattccttggaatttgcattcttctagaaaccaagtgtattttttaacacggcctcagaaatgttggggcaattgaccattcatgatgtctgcaaaggaaaagcatctaaatatttttcaagcgactttaataaatttgagtgcgtctgtcactacatgtaacctgattatttaaataagttaatattatcacttctcttttgccagctgctgtaagcagtcggctgctgtcattaagcaaaaaggccaagacaatgtgagtttatctggtcctacctgcatttctactcatcgttggactgaaacaaatgggaaagaaaaacttactgacttttggcgaactacaaaggttaactctattcatcatggagaaactgatactaagtgctttctgtctgtccatatattctaaagatttagaaggaacctggtagtgttcctgggagacagaagacagagtgttcatctttgccatatgcagagtgtctcttgcagttttctctttacctcactggcactgctgaaatccttcttagactacagagttttggaaacaagtttatttttcaatgagttaaaaagccaaagcttttctttcttaggatctttaactcttttaaggtaagtggcagggtttgaagctgctgttaaccgtttgaggagaaggagctcaatagcttgcagtgataggaagagaattctcatcacccaggttgcaataaaacgtgcctctcccgataccagtaaagcccactccggagatttccagagactgttggaaggcagtggaaggtaaacccagaggaaacacaagataaaggcaaccaggtggcctggttcttaaatcttaaagcaacagttccaaagttgagagcccgcattgcactctattgcacagcctgacaggagaagggacgaggaagttcagaacctggcaattggagtgtttcccagcgccgggtcccaccgcgcaccgcaccgaacaagaaatctttttcactttctataactcatttgcatgaatttacttttttgccttaagaggttgttgtaatgtgtgttaaaacacacagtgcaattttatctccataatatcacaaaagaaatattatgttagtataaagttaaaaaaaaatgctgcgagatcctgcagcacggcgagcggcaaagcgttgctcaaaagcgccacccaaaggcgggaggagtgtaacggcattcagggaggatcgtttttgttaatttcagcaatccgaatgtaaaaaatgacagcgccacgcaagttgacggaggcttttgattgaattgactgattgcctcagctgcacctgcggaaaattgatgacaatgctgtctaaaccattcattaggatttgaaacttcacgcagatgaatgctggattcataaatttgctagacatgtgttgtagataatatgacaaagcactgttttcaaatgaacatttctttgacctaattttatcaaaatcatgcaaaggaatgaaagaacatttgtacccgaactctttggaacagctgcaactgaggtctctctctccatctctccctctctctttctctctctctctctttaccttttttgtctttcaaataaatttaaatgaactatattgtttgaaatatatattctagtttatttaaattatttttagaatggcaaaacatttatttttacttattatgaacaatgttactctccgccagatgaaggaaaattattttgagggtttttttcaagctccaaatttgctaaattgaacacaagtggtaagtagatttttcaaataatattaataacgcgatctccacagacatgttggggggaaccgtttcagtaccaactggacatgcattctgtgagaagtggacttcttgcaggctttgaagggaaaagaaattcctgtaaaatattgacgcttttggtcaaaaatggcgaaaccagaaaaaaatgacatctgtgtatattgtatataagatttctgacttgttctcgattttaatgtatcaaaacactatcaatatttaatggagctttctctgtgtgtccaagaaagaaaaacaagatgtctgagaaggggaagggagcaccgttttcatacctggcttggcttagctgcacgagagaagaaaaggccgtggctgaatccatctccaggagcagctgtccccctgcaccgtttgaattgcgaggaaagagttacagttttagaaaagaatacctggtatttaagaattcgaatttctcgctgcagaactagatctcacttctacaacaaggaccctctgcttagtacttggactcccccccaaaaaaacaaaatgaatatttattaacgttagaagaacctggcgcaggtcggtccgtgcatccgaatctgccaaaacgcttccaaatctcttccctggcatttaaaagaaatctatttttatacattctcatgaatttgggttttactaccagtaaggtaatttctgattaggcatcttgggtttttctctctcttttttttttcttttttcctaaagaatccctgcaaatacacccgaggtgcttgagttaaccccacacctggatggagagaaactacaggtgtgaacggcaaggctaatagacttgagttttgccacgcatttattcttctttttttttttttttaccattctagcagttactttaaactggaaaacattattccaacaatccaaacaaggctctttaaggctgctatgcccaagctgctacagatacaaaattatcaagtagacatgtgaaaccccctaaatgcggaacaatctgggttggcttctaattgctatgtttcaatttctaatggggaaaatgtgtaaaacaaataactgggtattgggagctctgagcactaaaagcagaacattcttgtatttcagtaaatcatataactctacagatgggtttggaaagcctgaagctccagccaccttttagactatttggatccagcgtttgcttcgaattccgggcaatacgcttaaaacaaattacctgtttgtcttggatggcctttgcaatgagaaccctaggcctgcaagacctctgagattcattgacctcaccagcccacccacaaagaaagatacgtggatactccctgtattgcccagtcctggctacaatggcagggaggagcaggcaaacagcctccccgtcaaagatgttacaatctggtcaatgtacactggggtaggacacgtggggagtcaaatatacatcaatttctggcaacacacggcaagaaaacacagatgcccaaaaggacatcaactcaaggttaattcttagctctcacagaacgggggaacttgggcatagttaagcagcaaaagctttgggggaggaggtagcagagaatgtgtagggcagagatgtgtatatatgtgagcctccaaggatgcactaactgtgcctgttctttctcccttggttactacccttcctgctcttctggtagggttcagccaggcacagacaagagtgggcaaaggagcacccagccttgctgtgctcacccacgcatatatcctgcctggcctgggcagtcacctgagtttgtagcccttggagatgcacttgtcaccctctattctgacacctttataggaacaagcctttagtctcaacaatgagaaaaaaaataaaatgcccttcctccaagagcttcaactaagaatcatttcattcatcctaggcattctggtaatgtcctttttccagttccttgttctaagaaatgctgcattgtaggcatatttaaggaatctacccttctcccaccctaacctcctaagccagaggggctttttgttcccttatcctgtgtatcccctcaaaactcactcaaaatcttcttgtgtggtcagaatggggatccttttgagcttgttatgagacaggctctgtcctcactggggtctcaaatgctaaattaatttttatgtctctttagacacaatgaacaaaaaccagagcttttgaatacagatttccagtaaaaccaaacccagcttgggtcagatgcacctttccagcaaccaccatctcagcaacaacctgccagctgtcaactggaagttcagcttctgggaacttcagcccccttctcagaggagcaaggtcctagcaccaacagcacctgcagtggagcccaagtatggctgcttcatggagaaggcaggtaaagaggggtgtgcacactgtctcagggtggcaactcttattgataacgaaggcattgtggccttctgacgggtactgctgcccactgacaggtacgtgacagtacctccagctcaggtcagggttaggtctcagagacccttaagaaaatggtattccaggccaggcgtggtggctcacgcctgtaatcccagcactttgggaggctgagggggcagattacttgaggtcaggagttagagaccagcctggccaacatggcaaaaccccgtctctactaaaaatacaaaaattagccgggcatggtggtgggcgcctgtagtcccagctactcaggtggctgaggcgggagaatcacttgaacccaggaggtggaggttgcagtgagccaagatcatgccactgtactccagcctgggtgacagagttagattccatctcaaaaaacaaaaagtggtgttccaatcaaacaatagataattaacactgtgttccagggtcagatctggcagttgtgttggacagacaacacaggtagaggagagagaaaagaaaggaagaggttcaggccaggcatggtgcctcatgcctgtaatcccagcgctttgggaggccgaggtgggaggatggcttgaggccaagagttcaagaccagcctgggcaatatagtgagaacctgtctctccaaaaaatgaaaatagcacggcgtggtgatgcacgtctgtagtcccagctacttgggaggctgaggcaggaggattgcttgagcccaggaggttgaggctgcagggagatttgattgtgtgccactgtactccaacctggatgacagagggagaccctgtagaaagaaagaaaaaaggaaagggagcgggagagaggagagaaagagagagagagggaggaaagaaaaggaaaggaaaggaaaggaagggaagggaagggaagggagaaagaagaaagaagaagagaaagagagaaagagaaagagaggaaagaaggaaggaagaaaagaaggaaggagggagggagggatggagggagggacggaagggagagagggagggaaggaaggaaggaaggggggagggagggagggcacggtggctcacacctgtaatcccagcattttgggaggccgaggcaggcagatcacgaggtcaagagatcaagaccatcctagccaacatggtgaaaccccgtcgctactaaaaatacaaaaaattagctgggcatggtggtgggtgcctgtagtcccagctacttgggaggttgaatcgcttgagcccaggaggttgaggctgcaggagactcgtttgaacccaggaggcggaggttacagtgagccgcgatcatgccactgcactccagactggcgacagagcgaggctctgtctcaaagagagacagagagagaagaaatgaaaagaaaaaaaaaaagaaaaggaaagaaagaggttcaacaggcagagtatccttaaaaaactcacccagcccctccttcatttagataagaaaatggctgagaagtggcagagtcaaagttccgatgcaggcccatgggccctcttggttcacctcctccagcccaggcttctaaaactacttcccatacctgctgtattgcagcaaccatgctaatttagcaacttcccatcccagatgcataaagaagatggaaccaattcaccatgaatctatccacccaggcatttagacacaaaggtgaaaataacaacaggccctgtcctcgagaaactcctcgtccaacaggggaagggggagagtgccagtaaacagggccgttgagctctgtcccagcagtggggacaggcttgcatagaaccaccctcactcctgcagcaacttccctcatgccagacaagaatagagtgaaaggagacccccaccttagctttcttggcctggggctccatcctgctgtgcctagcaagaacacaacacacagacacacaccaatagatacatgtatcttaccactactgggggagaaagaaaagaaaaaataaatcactgggaaccgcagcagggtgagaacccagacctcagcaagtcccaatttcagaggtgacagcatctttaaatgccgcaggagtgcgctcctagctgaggcaggtgtgtggattcaacagttgaccccagctgtcgcagagcgcgaggaagctgcgcagtaaaccccttacatatcaacctctgaggaccggtttttctgcacctggtggtccttctagacgtctaggaggatcgtgttctcaggagagggttcttcagcatctgtgctgaagaacactgccccagcgggtcacatgcaagattccaccttcgagcaacatagctgacactctgcagcccagttgtcacttgtaacaaaccccagtgggtcacatagtgaggggaggcaaggctgcgtaaggcagtggctgaactatcccagaaaacaaggatcacaggcccccagtgacaccaatgttgcagaaacacctgcagtggcaagtcagatgtcctccaggaccaggcagataacaaggagtaggggtctgcagaggcctcgggagggtctgcaccatccaaagaaatcaattgttctgcacagtggtaaggatccagtgttcccagcacttccaaacatttgaatgaagccagaattccagataattatgtgaaatccccaattactaaatattggcaacaaattcatatttctttcaaataatctgtgaaccaagcaaaatacatctgtgggtagattgggatcccagatatgcactgtgtgaccgaccctagtaaaagccctccctccaaggaccctggacactcacacaaaccatttaattcctctccttcctcccaagccaagcatcacagcattcaacaggtaggactagcaagctcaggccaaggtcacagtgtcctgagcagggtgggctaggggaccttttgcacgatgttttcctttgggctgtgggaccacgtcatctggccagagagcaaaggctttcctagtagaagttaccctctgagcttgtgacatcgagggccctgcctctgggcagatcccccaagcatccgtgcagggctgcctgagaagctggaccagctctgacacagccagtgggatgttccacagcctcccagggcagaagggcttgtgggagattcgcttaaacgtgaccgatttcctctcgctggttatctgtggaaggtggaagaattaccccctggtcattagggaatcaccctttcacagcagcagagcgtgtgtgacctggatgatttaaattttagtttttgtcagcatgtgctttcatcagattgttctttttatatatttcatacatattatatatttataaatagatactaaatagacatagatatagatatatttaggtatgtgcatttatttttatattgtatttttttatctcatagttccttgctaatgcatatagactgagtccaatacgatagttaaaatgtcacattcctccaaatggatttccagatattgaaatgtgatcactgaggctcagtgggaatccctttgctctcaaactccccgatgcaatgccttctgatttcaacagaaaagcaagaggctccaggcaccccattcagggactgccaccaaagtacccgcaaatccttcatgaaaggggagacattgacacattctttttttattctctggtaggtatctgtttgcgtgcaaatccgtgagtgcttgcatctcgtgtatttgaaaatcctgtttaagaatgcagaggtccatatagtgtcattaaaacaaatgagtataaccctttggtcatctaggtgaaagcattttgttgggttttttttttttcaaattgctattgctatatataaatgtaacgtatagcaataaccgtagaaagatactgtgcccttgtgtatggataattaaaataggaacatctctggactaaattaaaatgtgtaaaaaccaaatccttatagcatccatgaaattacagaagctacaagtgaatcactagcccagggacgaagcatttctctcattacttcatgaacctcttccatgatcacagttttacattttcacaaatctacatggttctttttatgtcactaaatatctcagctcacttttactgccctccttatagacatgcgagttggtaacagcacgcaaacagtctccaatcatttaagagaaaccaacactttcagtgcttttgatgacacttattactacaaattatgaactaaaaaactgagcaggatataaggagataaattacatctttagaacataaagggggaaaaatgcatatttttcagtaccagaaaatcaaaacccatgggtcctaatctatgaattaagaagacctgaatacctgagaacgtgtacacagatttttgccctaacccatgacctgcttaactgtgtaactcccctcaacagaaagatcctgatttgcccttttctcctctgtactttgaacataagaggtgttattacccataactttttatttaaaggaattgtgcagctgggaaaatgaatgaatttaattatcaatgcagtgtgaaaaaaatcattagagcaagggcctggaacgccacatattaaaaataaacaaaggctattaaaaaacagttccaaaaaggaacgtcagtttttcttcaattcttaaaatgtaaataccaaaaagaaaaccatatgtaaacatctatagttacagaagaaattactctttaagaaaatgttaaatgactgactggatcatttaactttaaatctatactttatgtggcagtataggaaggtcatttgattgccatgcatagaaaaatgagaattctaatgtgttctcaaagtttcaccttcataagacaaaattttcattatgaaattgtatttaatggtgagcacatagaacttcttcctcaattgcatgggatgacacttctgtcagaggcgtgtgaaccagagcaactccatcttgaatgggggctgggtaaaatgatgctgagacccactgggctgcattcccagactgttaaggcattctaagtcacaggatgagataggaggctgacacaagacatgggtcgtaaagaccttgctgataaaaacagattgtagtaaagaagactgctaaaacccaccaaaaccaagatggccatgacagtgacctctggtcatcctgactgctactctcccaccagcgccatgacagtttacaaatgccgtggtaatgtcaggaagttaccctctatggtctaaaaagggaatatatgaataatccacacgttgtttagcatatcatcaagaaataaccataaaaatgggcaaccagcagtgcttggggatgctctgtctatggagtagcaattcttttattcctttactttcttaataaacttgctttcactttactcgacggactggccccgaattctttcttgcgcgagatccaagaaccctctcttggagtctggatggggaccccttttctgtaacatctttccggcgaccgcagaagggactacagtgaggaaatccccaacccaaaggttaactttgggtaagtgttaggatcctgtaacacttccataaccaaaggaagcttgtctttacctttctaaaagacagtggaattatatcttttaactaaatttttaaaaacaactctagattaatattccctccatgactggagagtaaaagcactgatttagctgagtattagggaaaaatactaagcacaggtgcccaggaaagtccttcctagtggacgaagactatggagaaacatgtgttctaggcatacaggaatgctgaactgcttatttgtggttctgaattttctgcttgggaccaaatttgacctgtagctgcagacttcccatggggtatttacagctgggccacttacaaattggaatccaggggagtccaggaaagatgaatggcagctcagttatttccagctgaaagtgaatggggcatctgaaattgaatggggccctggatcctgtaaacatatgagatcttagcctctgatagccaagtttggaaaatcaatgaaagcaatagactttctcctctgcccaatgcacacacaaaataataataataataataatgcaatgttgcttacactttcaagaggtttatggaccacctcaaagctcatgcatgcacccattcccccagccccaagagaagagacaggatgacagatccaaccggaacagagtgtggccccatggtggtctatctccagctaaacagagcaggagcaaatcccacaggagcaaactaagggaagacaaaataattccacctgggaggagaagagcagggggtcttttcttccatcagctcaaggaagactactttctgaccatagccacaagagttagacactgaagagagaaagagcatgtgggagatgcccagtgccgcagaaacgagacgctttctggacagtgagtccagtctccaccaagagggaggagagcccaggagctgccacatgtcctcagctatagcctctccctctggtgtaccagagcctcatgttggtgctggaaaagagaggtgcaggctgaaacccacatcaaacaattgtcactaaccaatatcacgcagttgtttttactttcaccaaaagctttggtgtatgtgtggttcctgatttacttatttccacgtctctcctctcccctgggtttcccagtgcctctctggaaggtcagtttctaagacagagtccagctggttcttcccagcctctctgggactgaatccctgcctggatctgccttcagggatcgccatcagaatggcacacagcacttgccagtcccctctctgagccttagtggccccatctctaaaaccagaacattgaacaaaagcatctgaaggtgaatggggccctggctcctgtaaatatatgagagcttagcctctgatggccaagagccttttggaaattcaatgaaagtgatggactttctcctcaccacaaaaagataataatgcaatgttgcttacaatgtcaattacatgggccacgccaaagctcatgcatgcgctccaagctaagagcccctgacctggctcaaaacgaccatcctcaccaccataagtttcaatatgagggaaactgagccccagagaagaggatagagtgtcccaaagccacacagaaggaaaatgaccaaactggaaagataacccatttcctacctcccaggcaacatccttttcctgggctcttctgccctctgcactccttcattctcatcaatgcctttctgattaccccaggtgttgccacctttttggctccccaggtaggaatttgatatctgggccccacaggtcacccccactccagagttcacctcccagcaatggcagggacttggggaaggaatgatgaaggtgaaacatgggagccagaagggggactatggccaaaataccacagccatcaggtaagcactggatgaccctggctgagaaaggggacaatggagacagaaaggagccacctgtcccttccacgcagaataggtggccctaagctgttgtttcaaaaagcacatttgctgtcttcaaaaaaatatatatgtggaggaggaggaggaggaagaggaaaaaaaaaagatgctcaggctagataaattcagaatgatttgaatacattactgtagttaagtttagtacataaagtactgaggatggctctgccgtgcatttcaatgaagcccaaaataatgaggcactagctgggctgttgcggcttcgtcagagcgattctgccctaataagtgggaaggaggtggctacggctccctgcctatgaattgtcctcatgggatttggcccggcctctgaggggaaggcaaatggaagatgagagaagctgggcagttgggatgagagactgaacacctggagagaagggtgagcccacgtggagcatttccaggcttgaaccagccaaggagtccttcaaggcaaaacaaaatctgtccccttagaccttccaggtcttcccaagggaggctgtggggggacgtggagtccaaataccagaagggcagcctccaacctgcttctcacagctctcttgtctccacctcctcagaccctacactcccaccagagaaaatggaaagacgtaacttagaaacctagaggcccagagagcaccagtgattccctccatgatccatcacagggaggaggttaaggagaggaggaagggaagagtgagaagagaaggaaatgagggagggagaaagagcaagggaagagatgaaggaagaaagagacaaaacaaagtcccccatctgtagctgcctcagcccctgaatggagagagatgctatatgtggctttctccagcatttccggggcctgaaatggctaatctgtaagagctagaggaggagagactgactccataaccactacatgagtcatgtgttccaaacagcctaggagccaacatccaggttgtggggacagacgaatgcagctgtggctcagaaaaagaacactagaaaacatgatggccctctgggaggaccctttgtagagcctggtctttgactccataatcaggcatttgacactcagacgctggagcagaaagagccatgaaggcagcagacctgatccctaggcagtgacaaaagagggtttcctttcccatcagtctccagccagagaagctgggagttctctcaggtgagcccagcagatgttacgagcttgcaaataaagggtgaaagtgactagcctccgtctaaagggaaacccaagcctatggccagcctctcactgagaaaatataaatagttaaatccgtaaaatcagcctccttttctgttctctggatataacttgctcctggacgtctgtgagtagttagctgaaaagctgttggggtggacatctgttgtttttgcctgcccagccgcttttctccttttactggaaatagcatcccgattttccttgaggaatcactcctcccccatgctcgatccatgtggtcttgggtggcgctgaacccacccccagctccagggacaggcaagtgacccagaccaggacaatgagggcatcatatcccacgggccaccatgattggctcacgggttgggataggaactaatatggaacagcctgactcaataacaggtctttgtgtaaaaagagaatcttttcactgaagttccagagaagatagatgaatgtctggtgctgctgacagccatcttgccaccacaaagaaagactccaagctgcttgaaaatggagttaaggcagagaacaccagagcagaagcctgctgacagcattcttgcccctggatccagctatacctgaagatctaccccctgggatttttagttacaggagccaagttcatctgtggtttgacaagcccatctgacgtgggcttcttgcaaaagccttaactaagataaactcacctatagagtctttttttttttttgagacctttggagcctctataactgagtctattttagtcaaggcttatggaatctaccataagttcacagatggactgataaacatataaggtgtctttgtccatttgtgctgctgtaatgatacctgagactgggtaattcataaaaaacagaaatttattttctcaccattctggaggttggaaagtccaagttcaagtgccagcaggttcagttttctggtgaagatgctgtctgtctccaagatggtgccttgctgctgcatcctctggagggaggaaccatgtcctcatgtggcagaaggtagaagggtgagccagttgaacactgcataaagcctttttcataaaggccttaatcgtactcacaagaaaggagtagctgggctcagtggctcatgcctgtaatctcagcactttcagagtccaaggagggaggatcgcttgagcccaggagtttgagaccagcctgagcaatatagcaagaccccatctctacaaagaattcaaaaattagcctgttatagtgataggcacctgtagtcccagctacttcggaggctggggtaggaggatcacttgagcctaggagtttgaggctacagtgagctatgatcacaccattgcactccagccagggcaacagagaaagactctgtttctggaaacaaaagagagagagagagttgccctcatggcctaatcacctcttaaatgctccacctgttagtaatatcacattggccaaaacacctgaattttacaggagacacattcaaaccatagcataatggatcctctgaagtcacagggctgatgggaggcagaagagcctcctctcccggtaccatgatgcctagcaggttcccggggtctccaaaaaaaggtatgcactggcccagttgcacttcgggctgcacagtgagtgaaggactccttccccaggaatatatcaagctgtgaagtattcacagtttttaaattactcatcaagagctggatttttttttctcctctgctaccttagttactgattatttccagacccatcagatacacaaactcttgtttttaaaatgcaatcagcacacccacgcacccatctatagatagtaaagaataggtgctgaagtccctggaatgtattgctatcatgcaagatgaaatggacagcattacaaatgtacactcagcaggaaaatacgatttacctggtaattcaagctggggatggataatcagttcatttcaaataatgaaccaagaaagcactgccatttggaaaacttgggggtccatgcttgtctgtgggatcttggtgtggctgtgtcattcttatgcagaagggtcaccacctcttccagaggacacaggacaccgtctccagtgggtcagatgcagctgatgggagaccacccaggcagactccccaggcaccattttctcatctggctccagtggttttagagcccacagagaggtctgtcatttcttcaaaggctgactctgtggaggggcagatggtgcacagttctgtccctgatctcgggacaggtttaaaagtcccatttgttgatttcctctcttgtcctctgtgcattcagtcccatcactgagctgcttatggctgggagctacaagatctttgtagtgggggatccttcgaatttatcctgacatggctccagaaaatgctcaggtgggttatggacaatgcactcttaagactccggaccagctactagagtgtagaccagggcagcagcaatacaggaaaacatctcaggaaaataaattcacacagaacccattatagctgattttgacctattttgaagaaaattgcaccgtttctaggtgtggagttgatctgttgcaggtggcctacactgtgacctctcttgtaggcatggagatgaacatacttggtatcatccactctcctgcactgctggctcagtcaccagccttttcaggcacggggtctgcaacctctctcatggtttgtgccatctcttgagtcaggagccacagacctcatccaggacttacagcctgacagattaaggagtccgataaatccacacattctgagttgttatgctgggcaaaagccatgcccatccacaagccagactcttggcctccactggaagctttggaactttattcccatcaaacactgacctaatccttgcactgagactgctatttacattaaaattggtcacataatgaaaaaaaaaggtagttcattaatatgctaagaagtgctaatttgaacattgctgaaaagcaattgcaaattccattttgcaacttgcaaatgtgatgcagtgcaaattagggctgatggacccatcttcagacattcaaacttcatctgggtatttctgagttccccaagccttggcggccgagattggttgcaagaccagtgggggtgatttctccttcattggagatgaaagaacgtgcttccagtagtgggtggacaaccatgagcccttctacacagatatcaggtgagtccaaggaagcctgtctcaaggggcttgctgaaatgacccgaaacagaagaataagaatgaccccaaatgcacacaacacatgtcttcagagagcttgagctgtgccagatggacaccctgcacccagtgaagcccccagcccccagcctcaactccatcttccgctgggcggccttcgatgctctgttgacccaagctgggttgagaggtagcctgaggccccctccttcagcaggagaagccagtgggaatcagagccagctttggcaagggtttgccattttcctcccagaggtgctctaggggcagctctctccatggaaaataaagccccagggactgtgccaggctcagttgccccttccatcttcctgctatcctcctcctgtctacaaaggcagtggagttagaacttacatgactgagcttccaaagtcagaagacacccagaaattgatgtgagatgaaaaatacacttgaaagtcccttaggacagtgtagcaccagagaccaacataccttccccttggtaagtggacgctgtcaactttacctccatctttgtctgtcattccttctttcattggattctagatgaagtgggtggcctgcctttggcaccatgctgtttcctttatttttttttaagtgtgtacctttaaacatataacagcccattacacacagcaagatgttccagctctaagagacaccagccacagtccctggtatccattgccaaggtctgccagccacagagccagcacaggcaacagctccccctgggtcttcacaccactctaagctaccttcccagaagtggaagaccagcacttctgctgggatctaactccaaggcagaagtgtctcactcatgaataaatcctcaggtgcaacttccttccttcctttccttccttccttccttccccctttctttccctccttcttttccttccttcactctttccttccttcctcccctccttccttctttcctcctatttttccttccttccttccctcctttctttcttctgcccttctcttccttccttctttccttccttccacccttctcttccttccttccttcatctcctccttccttccttatgtccttccttccttcctcctcttccttcgttccttccctccttccttccttcttccctctctcccttccttcccttcttacttccttttttccttccatcttttcttccttccacccttctcttccttccttcatcccctccttcctaccttctgcccttctctcccttctttccttccttccttctttcttccttccttccttctttccttccttccttccttttcttcctcctcagctacttctcaaaagggcacaaaagggtgaagtaaagagatggaggaacccggctaatgtaaggagaggcaagtccaccctggagccataaacaaggtgcaaacatagtcacatggacatgcagtgcccacggggacactgaaaacgtggccctgagctttccatggagctaaagccaaaaggaaaacaaaacccagtaaggagcaccttgtcagcaaaactgaaaaggcagcgatcctgcttttcctgcagctgaggcctgagagaaatttcttagctgggtcccctccaaggtaatggacaatgtcctcaccatagattctatgaggcagctcgctggcccgagccagagcctgacttagctctccaaaagtgtctgtttgctgggggattttctactcaaaggtgaaagtggaaagcagggaaggcaggcccaaccccaggcatctcccaccacagcctcccagaccccattatgtctcttcagcattgctcatgccactctcgggccacccatagggctttggcacacagacgccttcctaatcacccaggcatcttctcatgtgtcccccgctcagggaggctttctgtgaccactctgtccaaagtagatcatttcagccaggtgaggtggctcacgcctgtaatcccagcactttgggaggccgaggagggcagatcatttgaggtcagttcaagaccatcctgggcaacatggtgaaaccctgtctgtactaaaaatacaaaaattaactgggcgtggtggcccgtgccagtaatcccagctacttgggaggctgaggcatgagaattgcttgaacctgggaagcagaggttacggtgagctgagatcacaccactgcactccagcctggggacagagggagactccgtcccaaaacaaacaaaaaacaaagtggattgttttttcacattgcttattacaatctgaaattacctgtttcttatggttccatatagaacacaaactccacgtgagcaagaactttgtcttgctcaagctgaatcccaagctctaagaattttaccaggcatgtgacagatacttaataaatatttgcagaataaatgaattggcatgacaagtcctatgatagcatattctatatgccacgcacttctaagcactttgaaaatatgcaccttcatgtaacctttagagaagcccttggatataagttccaacaccaacccatttcacagatgaagaaacagaggcacagagaggctcggtaatttactggaataacacagctagtgagtggtaggaccaggaagtctggctacacagtcagagcccacgacctccacggccgatgtttgattggggcaggttgcccaatgcatgatgagcaaagtttgaatctacttccccgcactcagaaatcttccttacccattgctcctttctctctcattgttcctgaacgcattgtctaattttggcgataagcagcctaaaccatttaaattctcctttctttaatgttgttgattttagctaaaatgcaaagtgtagtgcggaggagcccagacggcatccactggagagtctgggattagttcattaataggttcggctactgcccgtgcggcagcataacattaggagctaactgcttctgaccacgcaccacttagaaccccacatttgcaaatcagctcaagacgcatgtcaccatgagagatgacagtgttaaagaaatgcatttttcattgattctattaatattagtaatacctcttattgaatatgattggtgtagacaatgcaaaaagtcgtttttctcatttattttcgaaatcagccagcatgccccaataccagccttgctctgtggacagctgctggctgtgagcattttatggagacggatatgccaggcctggtctggcctcttttagccctgcctgtaccccaacacatgcccaagtccagagcaggaactattggaaccatttacagcccattaagaatgcccaaagctgagcaccgtggctcacgcctgtaatcccagcactttaggaggccgaggcaggcagatggcttgagcccaggagtttgagaccagcctgggcaacatgtcaaaaccccatccctacaaaaaatacaaaaacattagctggacatgcacacctgtagtcccagcttacccaggaggctgaggcagaaggctcacctgagccagggaggtcgaggctacagtgaatcatgattgtgccattgtacccaactctgggcaacacggggaaaatctgtctccaaaaaaaaaaaaaaaaaatgcctgagaactgaatggagatttctggggaattaggttcctctataccccagggaagcctgcaaaggagccccctgatctctgagacacatgttctggtgtgattgtgttgaatgaagtcccagatgcagtgccactggcacattggcacatggagctcaaaggaaaggaacaggggaatgagtcggacctgtgtgtcttgtgccaggcctgccactctgcacaccggccccagccttacaagtctccctcactgtgcagtcctactctgaacgtttccacgttttttgtttttttttgcctcctagtttctgcttctccaagtccctgccttcacacatcatgacctcctgtggcccatccaccttgtggcaactttgctgcttttagcttcaaattcaaatgtggattgccacgctgagagaaagcaatgcctaggaaaatatcctggaaaaaaaaaaaaacaagaaactacactgctctttcctttactgccccttttcctttctctgccttttgttcaaagaggtatccaggaagtgtgaagtctcccaggatccaaggaggctgaggaaaccagcatagttttccctgagcaaatttcagtttaccaggcttgtaggaagtcagagccaaaaaaagaaatcagcattttggcaaggcccagcctggatgaatctcaaatgagtcatttgagaagaatgtaatgggctgcccattttacctagtggtacaactacctgcccaagaagagagtagaaaatgctactgcgggaaaattgcctaatctgagcttgagttgatgcaagaagcccagtttcatactgatatggttttgctgtgtccccacctaaatctcatcttgaattgcagttcccataatccccacatgtcataggagggacccgctgagaggtagctgaatcataagggcagttacctccatgctgttctcgtgatagtgaattctcatgagatctgatggttttataaggggcttttcccccttttgctcggcatttctccttgctgctgccatgtgaagaaggacatgtttgcttcctcttctgccatgattataagttttataagtttgctgaggcctctccagccatgcagaactgtgagtcaattaaacctcttccctttataaattaaccactctcaggtatgtctttattagcagcatgaaaatggactaatacacctaccattttctttttcactgttaaattacacattgggtttctgggtttatacatcagtctcatgatcttgactaatgtgagtccacacctaagagacagatccactctcagaatcagaatcaaatcttgtttctagatttgtgaggtggagaatcaaactacaagctgtgataaatttaccactaacaaatgtcaacctgcagaggcagccaccacccctccaccccaaccccaccaacaatccccagtaagtcccattcttgagaggagaaggcaggaaagggtacacatgagccacaacctaggacaatgattctcaaccctggctgcacagtggaatcatctggtctcaccacagaatttcttatttaactggtctggggtgccacttgggaattggggttttttgaagctctccagatggctctgctgtgcagtcaaacttgagaaccacagactagagcttggaagcacccagtctgaataaagaccaagagtggctgggcatgatggctcacacctataatcccagcaccttgggaacctgaggcgggagatcccttgagcccaggagttcaagaccagcctgggaaacacagtgagatcccatctcagcaaaaaatttaaaaattagtgaggcaaggtggcatgtgcctgtagtcccagatattcagaaggccaagcacgaggattgcttgagcccgagagttcaaggctgcagtgagctgtgattgtgccatgtctctccagccagggagacagagggagaccccacctctaaaagaataaaatatagtagaatgatttataatcctttcggtatatacccagttatgggattgctgggtcaaatggtatttctggttgtagatccttgaggaatcaccccactgtcttccacaatagttgagctaatttacactcccatcaacagcgtgaaagcattcctgtttctccacaatgagagactgaataaagaaaatgtggcacatatacaccatgaaatgctatgcagctataaaaaagaatgagttaaaattagctgggagtggtggtgggcacctgtaattccagctactcgggaggctgagacagagaactgcttgaacctgagatgggaagtttgcagtgagtggagatcatgccactgcactccagcctgggcgagagagcgagactccatctaaaaaaaaaaaaaaaaaaaatgagttcatggttcatgtcctttgcagggacatgcatgaagctggaaaccatcattctcagcaaactaacataggaccagaaaaccagacattgcacgttctgactcataagtgggagctgaacaatgagaacacgtggacacagggaggggaacaccacacactggagcctgtcaggggttggggggcaaggggagtgagagcattaggacaaatacctaatgcgtgaggggcttaaaacctagatgatgagttgataggtgcagcaaaccaccatggcacttgtatacccatgtaacaaacctgcacattctgcacatgtatcccagaacttaaagtaaaaaaattttttttaaaaagaatgaaataaaataaaatataaaagaccagagggcagagagtaggagcagcccacaggagtgctgagaagaagcctccagagacagaaaaggacttccaccaagggaatgccgctcatccttctccatcactccctcactgagttctgccaggagggcacctcgctgtaagtcaggcctctgtgtcagccgccaagaataactgcttgccctcactgaagttcaaaactgccttcggaagccagttagagcctataattagaattcactgcaactctggcaacacgcagcccatccaccgcccaggactccagcggcatcggctgtagcccggtgatttaaaaccacagtggacagattcgccacacctaatgtgcatcccttggtgggttgccccctctgatgtccactgggaaggaattgaattacggccttagatacaagactgagaagttgcaggaggaagtcgcaattatgcacagaactggatgggcaatttgaggagaaggtgacaagagaagctaaatctgcctcccttttgtccttcaagtctccttccagaaacccgttccagcacccaccctgccagagacgcggtctgcaatgctggaagcaatgtaaggggtggaggggtggggggttgagcttgcatttgaacctctcttataatgccagaatggagacagcataattagtcttcactttcacaagtaataaatacactcaaattaaaaatacatttgtaccactcatattacccctgcatatatcataacatgtaaatacacattctgcttgtcttttgctaatcatttgctttatattttcatgttggtcaacaggataaataaacgtcttcctatgtatctcagtatcattaatattctttaaaatgtgtaggttctcatttaaggctgaatgagcgcttttgcctatggccgtggaaacaattaggaaatttgtgaattacatgactggtttgcttgcatttcccaagctaaatatttaagaaagctttctctcatgaacaaccaaaagtttttggtaagcgcaatcattcagggagaagaactatggaaataataccaaatttggaattggaagcctctggttggagtcccagctcatgcataaaactattctgtgactttggccatcagcacctccctggggtttagcttcctcaccaagctgggaatacccttacctcacctacctccctttttaaatttaactcttattttaggttcaggggtacaagtgcaggtttgttataaaggtaaatgtgtgtcatggggacttattatacagattattttgtcacccagttttttaagcttagtactctttagttatttttcctgatcctctccctcctcccacacttcaccttctgacaggccccagtgtgcattgttcccctctatgtgtccatgtgttctcatcatttagctcccacttataagtgagaacatgcggtatttgggtttctgtgcattagtttgctaaggataatggcctccagctccatccatgcccctgaaaaggatacaatctcgttcttttatatggctgcatagtattccatgctgtatatggaccacattttctttatccagtctaccattgatgggcatttaggttgactccttgtctttgctattggaaatagtgctgtgatgaacatatgcatgcatgtgtctttatggtaaacaatttatattcctttgcatatatacccagtaatgggatggctgggtcgaatggtagtcctgtttttaggtctttgcggaattgccacgctgactcgcacaatggttgaactaatttacactcccaccaacagtgtatatgtgttcccttttctccacagcctctccagcacctgttattttttgactttttagtaatagccatttaccttacctgtctcttactaataggagtattagcagatgcccgactagagagagaccacatgaggcagggaagtgcaggaaagagagcttgtcacggatggggccagtgatggaccagacatcatccaaatggcccagggacgacatagtgttcccagagccccatgagcgggcccaggaacctcagaggaaggcctctgtgacaggagctgaatctctgccagatacctggccccaaagcagagagggagcttgagacagcacacccgccttgttctctgattcccttttgcagcctaccggtgggcaaatctaattggcactggccagcatgggcagcctgcagggccaggctcctggggcagggggagggccagggaaggctggtaaatgggtgatggggggtgggcaacagaggcctctccagagtgaaaatctccatcccacctcaggaatgaaaaacgtgccccttcccttcaagttttcaaggtgccttagaattcagctcccttcagccaaggaagcccccgatgctgagtgagaagggaagcacagctttaatcaaaagaatgttgatgaattaaccccattttcaaaaagttcagtacccaagaaagcaaagtttttcacattagattagaaaagattgttttccattaaaggttctctaagtactctgcccatctgcccagggatctttcccagggaagcacccccatccccccgcctcgcctcctgcaccctgaggtcagaggctggcatgggctggaggagagaatgaccagcaagcaggtgggccaggtaagagagtgtgcatgcccagaggaggtcagtcacctgccaccgcaaccatcctgattctcagcacatacctattggtttagtctctggtagtccagtgtcaatgaagaacaatgacactgatgtggttttgcaacaccacaggcaatcaaggcatccccaaatgctcatttcaccctgcatgtcctcaggagatgccccagtcatgtcctgaagtttcattttaggagaacatcctgttctggtacctgggtggacctcaagggttaatccaatccaagcctctgtttgatagataaataagctgagacctaaagaaaggatgtggcttgcttaagaccacacagcaagcaaatggaagagctcaggcttcccagctcctaggccagggctccttacttatcccctaactccccagctgagcaacttccatgagaaaatgcatggggatgcggtctttgtcatgatttagggaagcagggaatgcaggctctaaaattagactgcctgcgttcaaactcctgctccactagctctatgagtttggacacaatatgtaacctttttaagcctcagtctctgcatctgtaaaatggatacaaaaaaaaaagaatcttatcttatctcagggagtcattaaaagaatgagataggtcaggtgcagtggctcatgcctgtattttcagcattttgggaggccgaggcaggtggatcacctgaggtcaggagttcaagaccagcctggccaacatgatgaaacgccgtctctactaaaaatacaaaaattagccaggcatggtagcacacgcttgtattccagctactggggaggctgaggcaggagaatcatttaagcctgggagcaggaggttgcagtgagcccagatcaagccactgcactccagcctgggtgacagagtgagactccatctcaaaaaacaaaacaaaacaaaaagaatgagacagagcatgtaaagtactaggtacagagtaagcaataaaaaaatgtctgctgttgccagttcaccagaagatcactattaacgataatagctctatgttctgcattttgtcagccagacctagcacctgttccttgctggaacttgggatcctactggactagagaactctgaatcagctgagagcaaagctccttccatcatttcatggggagtcaaagcacttgtcaaagcacatccatctccacggaatgaggagacccatgcccacctgcagaggcagggcagagagagaagcatgaagcatgaatgggctgccccagctactttgcctggactttgacaaagctgggaatctggtatgtccacatgctaccagcctcccaggggggcagaaatggggtcatgctcactttaaataccaaactgtaatgactcgagccccaccatcttgattctggaactcagctctctcctactctcctgccctctgcaaagcacccactcagccgccaccatgttcttcccctgtcttctggctcccttggcccttgtctgtttccatggaaaccacctagcaaatccctggaccaaggagctgtctctaagcctccagggggcaccccgaacaggacctctgattgtgctataggacgggagaccaggtctggcagctctctgtcacgagacccttcttgcttctccttacccttcaacagctctcatccccatccctccttcctcacaccaccaatggcccccttcaagttctctgttatccagctgcacttttgggtccattcctgcacagggcaatcaaacagggcccggctgcctggaatcgatgagtctttatggagtcaggcatcccgacatccactgaggccagagcgagggagcccccatgagctggaggactaggaatgaaaaaaatgaagaaaaataataaaattgctattgcttctggatgaaatatcctgatagtcagatgaaaggagagcttgaaatcataatcataatcatctttggtctttgcctgtgtagacctggcctaaggctttaatgtaaacccatggtgattctgaaagctacatgaatagttcatttcccagcaaaactgccatacagggagacaaataatttaagtagggacaatgcttcaccagtatgcacatattagaagtttaaaatcacaacccagggaaagccagagagagaaagaaggaaaaacaaacttttttgtctcaatttctgctagctggaaagatcgttccattctgaagctgtcgtggtctccctggcagagcctcttttccctctgagagaaggagctgggagggggtgcctgcacacagatgaaacatagagacgggagacccttcttggaggagcaggggggaaatttagaggcagagatacctggctataaattcacaactggaaatttacagaggatatgtctccactctagaaaagcaaccaaaggcttattgacatgagattcatgtaaatgaggtctaatttctcaccccgggtgcacatcatcactttcctgagacgttggattttctgagtgtttcaccccacattccacccagaatcaatgtatgggttatagattattgatcactgaggacccaggccccagcctcgctttcagtgtcagaatgagagctattgttctccttcccagacatttaaccgtgagtcatcacacattttcagacatagagcaattatttattgtcatgttatgctacccaagcttgtcaggaatttaaactgaagaatatgtgcacgtgccatcctgaggcagtattctagatacatgaggaaagtcagaaaaacgttactggtccaagaacaaactctaaacgtttggcttttgattctctgtctaatatatagcaatttcaatgagactaatatcaccattctgtgaacctgccagcagatagaagttcccacattattgtggtctgtttccgaggacaaataaagtatgctgctctccagtgttctgtagaagcacgccacgctatagacagaagtgtttcaagtcaacacaatatgaaaaaattcaaaataaaatgaaaagtgtctgaaaacaaaccaacataaatatacagcagtcctgttaattatgattatttatgatcataagaactggcatcattactgtggtttcctttccaaaatctcacaaacttgttactatacagcagtttcggagttctataggcttaaaaaggtggcgtgctggaggcaaaagtcatttttggcagggatgacgtacgtcccgaatgtgagggcttgcacccacgcaggcacgtgtgtgctgctggcacacaatagagtcagcttggactttccagggtcccccaacgttaaaccactggcaatgcattacagatgtctctgatgagcaccgccaatctattaaacaaagtgctctcatcgcctccgaggggcctgaagaatgatctagaaatccaccccctggagggaaacagcctatgaaacatcaaagacaacactgaatatttcatcagggataacaggacttttctctttgtagccctccccgcttttccactgccctgcctgccactgtctcccccccgccctccccaatctttttctccactcacttgacaagtagtcacggccacatcactgccgtcccgctgtccttgcacgctgacctctgtactgtgtggtgcccagtggtcatgctgtcctcgtctctcaccaaccacatctgacaggagacgaggcactcgtggcagcggctcctggcacctgagacaccctgggactacacaggtaaaccaggggggtctgtgttgtctccagactaacaacagaaggaaagacatgacatctccaaccaggagcccacgtccgaatattcaaaaggttcatcatgcgggagatgggggcggccctcccggctttccaggatgaggcctgcagaagtcaggagggatgacgagaggaggagggaggcccacacctggtcccggcccaatcaggggagaagaagaatgcgggtgtaacagaccagcgatgtcaactccggggtgagggtgcaggggagtgtcagcccctaccctctccagggacccctcccaggcaggcttcagacccctagacatgtgtagtcacacaggcagctgagagatcggctcttcctcggggacacagtcgccacccagtcctgtggctccttcagtacccaaggagacaacgaaggttgattagtcaaaaaagaaaatagctcctttaaaaatgacatggcggttttgagttgctatattttcttacagctcctttttggtgaatgtcggagtggagaaaaagcatgaagtattttgactgaaataaatgctttcatggaaaacagagagccctagagagtattctaagactggaagaacgtcatactattttaagcaggtgacagtaatgtcactgtctgaggggttagggtattttttttccctagaattacaagaggaaaaaataagtttgctttgaatagagaaagttaagtaaagaaacacacttcccagttgcatggataattcatagactgcagtgacatatttccctgctcttggtctttgacaaaactaaccagtactattaggcagagaatgtttgctagctccaagcagaaaactaaataaagtacaaacatactcttcaaatcactctgatttttccaactttcattacaccacccacatcaacatggctgcaatgcaattgttcaaaaccctatcccagctctccctctgtttatcatggacagagaaggtctggggaaaatccggacagcacactttatctaatgagcttaaagcttcttccaggctactggttattttccttttcttccttgatagtactgaagagtcaatagaagggtagatggcattgcatgttaccttctagtactaccagcattaatggagatccttcctgtttcagtacacagcactgaaatacacacacacacacacaaaagagtcttgcaggccaggcgcagtggctcacatccgtaatctcagcactttgggaggccaagtcgggcagatcacttgaagtcagcagtttgagaccagcctggccaacatgatgaaaccccgtctctactaaaaatgcaaaacattagctgggcatggtggtgcatgcctataatcccagcttctcgggaggctgaggcatgagaatcgcttgaacctgggaggcagaggttgcaatgagccgagattgtggcactgcactccagcctgggtgacagagtaagactgtcagaaatcttgttagaagacttcactaggaccacatccatttactgcccacctcttcaccccaggttgctggctgccatttggcagctgtttaagagtggctcttgggagggtaggagcagtcctgtggcagctgtgttcttgggttccatggtgaggccatcatgaagccatggtgaggctccttctgggccaggagctggaacggatgaagaccccagctcaataggtcccatggtggagtccccgcccccactgtcaccacctctcaccttcccacgtgcaggtacaccatctatcatgaagagaaaatgtgctttccactcccagctcagcaacagcacctggggccaggaggaagaagagagagaacagggaggtgacttcgctggggccctggtgcctctgagctcaggagaatacccagaagataatatggacatgtgaagagtggttcaagagcacacctctgccagctgaactgctgctgctgctgtacagttcttggggccagaccaaccttgaatgcctttgaggacaaagccatccctccctagatgagacccaataatcagtctccttggaaacatctagctccctggcaactacacccactcaagctggcccagcccctcttgggggatggaagagtgcctcagatggatttgtatcaagaggctgtgctctgaatccccttatggggtcttgctaagctggaatcccacatgaagtcacaccgtcacggggccttctccactggggcctccaccacactgacgccactcaaggtcagggactctccaactacaaaagtaagattttcttctgaagaaacctcacatcccaataagctcagaaggaataagataactgctttcataaccacgcagtgtcttcttttattattttttaaagggacaaagtctcactctgtcacccagactggagtgcagtggtgcaatcgtagctcactgcagcctccaactcctgggctcaaaggatcttcctgcctcagcttcccaagtagccaggactacaagcacaggccaccacacccagctaattcttttaattttttattttttttaagatgaaaggagagacccaatcttgctatgctgcccaggctagtcttgaacccctgacctcaagcaatcctcctgtctcagcctcccaagtctctgggattacaggtatgagccatcatggctggcatcttgtgtctgtaaagcgaggccccaaaatagtgcaccaggatggcatgggacttcagagcactatgtcaccctgatgctacagacccctgcttcccaccagcacagcagtggcagtgtggcctgccacatacacaggtcatcagcccagagagagggcactcctcagagctgaaatccagagaagggtggctgtgctgcgtaccctgggtcctcatggggctctaggaaggcggaactgaggccagcagcatttactccagagcagagaggagtttcagaattcacatgaaataaaacaaaaatctaaacccaagctgagatttcattacagaatcccactctagggctgcaggagcccccatccccactttcactccactcccttggctgtccagatgtccaggttgggtcgccagaaaggccagttgccccaaggccccagagaatgttctgctgctaggccagagcaccatccccaggactactctccatgcatggccagctgcctagttgggtttcaccttggttatttggtgaatatctatttggagcatgttcttatctcagcagacacttccaataagaagactgagccaccaggcagatgttataagcaatgtgagcttgtgctggaagaagagagaatccaccagtgtcctgggccctccaaggcctctctgagggaaagacatttggacagagatgccaaggacaaggaagaggcagtcacccacctctgggcaaggtgcaaaagcccaagattcacgttcatgtgttgcaagcacaaaaagaagatcctgtggctggagtagagtgaggaacagtgagaatggtaggagcagagggcagagaaagtggcaaaaacaaggtcgcatgaggccttgtaagccatggtcaagaggtgatattttattttaaatgaatccaaagtaattgcaagtttttgagcaagtaagcaaaatgctcctttgcaaaaaacaaaaaaaaaaaaaaaaaaaaaacaaacaaacaaacaaaaaaaaaaactctagggcttcagtaaggcaaacaaattgtgagtgggaaagagtggatgcaggacttttaggcaagggtggggtcagggaagatggagaagagaagacataagatgtttggaggtggagccaacaagatgcattattgactaggttgcaggtacctggcaggagacaggggctttctcgaccactcatgcaagagaagagtccaggatgctgcttcagtcacctgtctgtccacaatgacaatggggcatgaaaaaatgccctaactcagggcataataaaataattagcttttatttagtacacaagtctgaactttgcattttaggctgggctcggctgggcagttgttctggttttgaaagggctcattcacatgctggtggtgggttggctgttagctgggataagaggtaaatgggccatttggctcccaccctccatgtgaggctggcccaggcacatcctcatggtgaaggccaaggtggaaaactggaccagcccaagcacaaagcatttttcatgcctcttctcctgcttatttgttatcgcccctttggccagagcaagtcacaggacagatctcagcatcaaagtggatggcccttataaagatagatggccaggggtgaggacttagaccactcatgcaatctgtctacccaccacacaaggtcctagatgtttgacttgaataacagggtagctgaaggtgccttttattgccatggggcaaactgggagaggaatgcattgtagatggcaggaatcagggattctattttggcttagggacctgccgggcagctttatgctccctaagcactgagtgagggctcatgggaactgctccatgcctatgggtaattctgctcttctggttttgaataaaattcactaacctggagtttcaaagtcccaagaaggcaaaccttctgatgatgatgccagtgagcctgcattcaggtgacaacatggcaaagagcggttcctccccagtcccaaagtgacacccgtcagctgaacagtgacggacatttgtcacttgccaaacagattccttctgtctgtcatgtccccatcctgtctccactgcagaaggagctggagcctccttttactgagaggctctccaatcttatgctgatcgttaactaagatatttctctccagagatttattacattaatgagctctgaaattactcatagcaattaagtatattgtttttaaactcttcagaaatcatcaaaacacattggttgtttttcagggaaacataaataaagggtacaacttgtcacccaataaatcctgcagcctgctctcttcatgttggtttggggagtttctggcccctagtctccaaggtgtgccttcacaactgaaaggtgttccactagtgaaacttgtcctttttctttctttcgtctttcttttcttcctttttctttctttcttttgttctctctctctctctgtttctctctctgtttctctctctctctctctctcaactttccttctttctttcatgttattgttttactttttagagacagggtttcagcttggcatggtgactcagacctataatcccagcattttgggagacaaaggcacaaggattgcttgagctcaggagtttgagaccagacagagcaacatgacaaaaccttgtctctacaaaaaacatgcaaattagccaggcgtggtagtgtacctgtagtcctagctactggagaggctgagatgggaggatcacttgggcccagtaggcagaggctgcagtgagctgagatcatgccactgcactccagcctgggcaacagagtgagaccctgtctcaaaaaaaaaaaaaaaagagagagagagagagagaggcacagaactcaggtccttctagatattaataaaaaggaacttcttacaatctgtttcatttagttttcacaactagaagggcaaactcttattattccccatcttacgaataaggaaactgagacacacagagggtaagtgatttgcttaagttactgtaggcttggagttttgtacctctccagattctctctccatgcagggaggctgcccccaaatggactacattatgggctctgggtcagtttcagccaatgagagctgctgtatcagatcagaaggtaggaggagagggaatgggggtatttgttctcccagctgcctcctggaagggatgctacttgctgttgcttctttccattaatccttctctgtcttcaggctccaaactactctttcccaacatccatgtctcggcctctccctacccaaaccctaccctgtggactcctaaactccacttgctcctttgtcaatggctctttcactgtttcattaaagccttttttttttttttttttttttttttgagacagagtctcaactccgtcgcccggctggaatgcagtagtgcgatctcagcttactgcaacctctacctcccaggttcaagtgattctcatgcctcagcctcccgagcagctgggattacaggcacatgacactatgccccactaatttttgtatttttagtagagacgggtttcaccatgttggccagtctgctctggaactcctgacctcaagtgatccacccacctcagcctcccaaagtgctgggattacaggcgtgagccaccacgcccagcccattaagccctctttgatttgcatactttgagctttgaacatgccatctgcttgtttctaggccccaaactcccaaatctatactctaaccactaccccacattccctgtgtcctgcaccccagaaaacaagaagcttgacagacggcagggtaagaaaattactggtacatttttctttcactcttgaagctaaaaaaaagacttgagagcttcttacattctgagccctttggcaggactttgttcaccttggtgggtgatgggaaggacagaggagccccatcaggaacaccagcatggaccctggtggcccaccaacaccagcacaccagcacagccctagttatttaaatacatgagaggacaatcacagaatcttcgctaggctctgccgtgggctgtgcagtacagaaagagtgctgacagtgtgtacagaggagaaaggagagacccaaagtcccagggctggagaaaaactcaccagccagcccttcctggaaccccatgtgcaaggaaactagcttacttttcagcaggagcctttgagtctcaaattcaagtgagttagccctggtcactgcaaccccagcactgccagagggaactcggcttggagggagggatgcctcttccactctccagcacactgcaaacccccattcacagcacaggatgaaggcctcactccggagctcagggagatggcagtgtcctgaatgagatcacaggacaggacaaagagaaagaatgtgggtccagctccctttcccattgggaagtgtctttgcttcccaactagaatctgtaggctgcctggagctcccctccccatcactccctggcaccagccatgctcacttcatggggatacgaaatgtctcagtggtgtgcaccttagtttctagcaccgttaaggacccagatcaaatcccttttcctccatgaagctaggctatgggaggcctctctgagctccatttggacttgctaaggtgtctcatgctgcctcaaccaccccacaggagcccttttaggcagggggctgagccttcatagctctcacatctccccatctcacatggacacataggccacactccagaaacactagctgttggttccaaaaggcagccaaaacagagaaaattgcagattcctggggctgaaaaggacctcagagaccatctggaccattctacaggtgggaaaactgatacccagaaggagaaactagacaaaaaacctagatgcaaagctagaggctcctaatcccaatccagggttcctgagctattgcaagcccatcccagccttcttgcatctacttgcatttctcattgccccgtttggacccccagaagtagccaacccaaagagcatcaatatcagagcctctcagagtgtgaggaaggcactctgtaagtattagatgcacagtggcccagggattttttttaagtttagcaataatcaatgtttgctgccaccaccatttcctcaaggattgtaacccagagccctttgcaagtccggggctgtgtgccatttgacctcattggtaggatggtaactataaaaggcagttgtgtttaaaatgtgtccattaaaaattaaaaccttctaggagcttaatgccaaatgtgcagattccacctccttccactccctgccaagcattccatgccaataaagtgtaatggttttaatatccttcaaaattaacataggataaggcaaccacattaaaacagcaatgaacaaatccctcccccatccccccaaaataaagaaactaacaaaaggggatgattgaggcttggtggggtgagtcctgagggcagaaattctggttactacaggaggtctctgaatccagacttgggaagagctgttggggtatctcttgccagggagagaagactgtgagaatgagatcttcatttgcaaggtattgcaaaagctggggtgacttgctagtgcccattcagaaagcacccactaaaaccccagcacaaatcaattcatcctgaactgagctcctgcaaagagacattaaaatttgtctgtgcataataatgggaacagtagagactataagaacagggagggagtggggaaggactgaaaaactacctatccagtatcatgctcactaccctggttacaggtcaatcgtaccccaaaccttagttaacatcatgcaatatacccacatcacacacctgcaccagtactccctgaacctaaaataaaagtaatgaaactattctaaaattgattttggtgatagttgcaaaattgtatgaatataataaaaccattgagttgtacaccttgaaaaaaacagaaatttagaagttaataagtaaataaacaaaaacttaaaaaaaaaattgtctatgaatagcatccagcacagcagggccaggaagaggagctatcaaggaaaagggggccccacccatcctcaggctcagctccagcccccacccagcccccctgcagccgcagaacccaagattctgaacctcatcatccccccgccaccagctccagccccatcatacctcccacctccaagcaggtgtatcttcattgaagtgatcccttgaaggaaccaaacagctaaactcaagcaagaccaaggatcaaagtggggaccgctcagacccatatgaacagaactggccacagtgacgtgtccaagaaagcccttgtctaagaggagctaacaatggcgccacagagaggccacggccaggctctcgggcaccatgatactacagaaataaagctaaattataccacttgtcatcattaagaaaaattttcatcttctttcttcatttgaaaagcactatatttaatgaatgcgtactgagtcatgacacgcaaacgactaaaatacaggaattatactggggtcaactaacgtattttaaaaccttgaaattaagggacttattcatgcctgtcaccagtgtgactcccagtcattagggtcctctgcatggctgcctgtgagcaatggggaatggcggatatttctgcaaggggtagcccaagcttccttgcaaattccatcatggtcaagatgaagaaatcttgttcacctgtttgcccaccttctgtgggcctgtgctctctttgggtgtgtatccaatgaaggcattactggtcttgtgcaaggtaagccccattccaaaggcatattttgcagattcatcactaatgaaaggtggagctttgacacctcctgtgcttccacaatgggggcccataccaggtgtgcatcagaagagtggctctttctcaactgcattcatctttaatttctccaggaaaattaagatgtctcaaagtctgaactctgcaaaagtttgcatgaaaaatggcaaagaaaaaaaaaagatggcaagatcaaccaggaaacctgaaatgaggaagtttgaactatcttccaaggtcttgacacctttaggttgaagtgggcatatttttgtttttccaccctccaactatcagctcttttcttggtaaagcagtattctgaatttcctttggtgaagccacagcttccattctcaagcatgaagtttgagtagggttgacctcacatacagcaccaaggttggatgccgttgtaagccaatcagtttatgcctttatccgaccacaggaattcgtggcccaattctggtcaagttattgatgattgcatatagatacaaagatttcatctgccagaaacacatatattcatgaaaggagtgcttagagctattggaaggggaaggtgatattgtgtggaagctgatgatgatgccaataccaagagggcccttgggcacaccttttattctgctggatcaaacctcacctgaagcagaactttgttgtttacaaaggccaagataattttctctcttttttaatccaatgagagttgggtgggttttatggcatgcagtgcttccagaatgtgaaaggccctgtccagaatcctatgatctagagcatacagaagcttttcaattgccttgcctccaataaacacaaagattactggactcaaagtaagtttcagtaaagagagtcagtaaacagtaaagagaggcagccgtatcagtagcaagacacatggagctcccagcttcctgagagctgggggtcaggtcacataaaacctcattgtttatggctgacctcttttcttatttatcaaatcccaaaccatcctagtcttttatacttggaaactacccctgccttgaactgtccaagcctgtcactgattaacttctctctgctaactaggctcactagtatctctgggattctgatggggacatacaagcaagaaaaatgaccaaaattccccccacccaagttgtccataaaacatgacatttgatcacatactttgaggccgctgcagtgttaaaagatgaagcttagagaatgggaaaagagaaagctatgatagaggagtctaatatcttcaactgtggcaagaaagagaggttgaggaagacttcacggttgtttctgtcttcccagcattcagatgaggatacaaacatgaaatttcaagctctaccaaggtggaaaacgtcttaaatgtcatctactctgacccttaatttaatgtttcatttcctgtcccaacctctcctacaaatgtccacatagcctgtgttgaatacttctgataatggggaactcactccctacctccctcagagacaataccttttttgattagtgttgaaagtctcaagttttcccttgttctgagcaaatatccatatctctgaagctcccacccattagggatgtccagaactcactgttctctcttcatctggaagctctcaaatatagaaagccagaaatcacggtcccctaggtgttcctatgtctggattgaatattctctattcatttttcacattgccttggttcagcatgtctaaccctgtcccaggctgtactgatcacaatactatctagtgtggactggtcagcatggcaagatagagatccttctcatcacctccatgttctttacactatactcccattaatacagccacagttacactgtgattagacagaccagtagggatttagaccagtggaatttctcctccttatttttcaacagaggtaagatatgctctgcttataagaaatccaccttaaaattgtaatcgatgctcccacattttgggctggtgagaaagcacattgcctggtggtgagttaagaacatgccagtctccatgcagtgggagggggaaaagaagtgttttcagcttcaaagatgaatgtgtaagtaaaagtgaagtctaccaaattgaaactgatcaatgtaggccacccatcgctaattgtcacccagctattttgcttccacgagtcacgtggtgggtgacagccagagacattgatggattctgacctagactagaaatctggtttctaaagaagaaagaaaggaaagagagaaagatgcaatgaaattaacggcccagcatgaagagaagggagtggggaaaaggcggtgtctttgacagctcaagctgaggaggaaaattagaaaagaaagccgactccaccgccatatgtgttagagctggccgggacagctggaagaaatatcgcccagcccgaatccctggccaggattgtgatccatgtctgcatacggctatcaataaccctgcatgattaatgctaatgatttatgttaattttgccataagctttatttgtgcccggtgttgaacttatggatgtcaaatcattccttaggaggttgctagagatttttaaaagcaaagtctaaaatataacatctgacattccatatatcacagccccagcctccccaacattctttgtgagatgagggtcaccatcccccatgtaattgcctctcagtcagcaagaagtctttgggaaaggctccacgttacaggaaggatagctccacagggacctgcaggttcctctattttggggggttggtgttgcaaagtccatccctgacaccccacctgtctccatgggctaccatttatccaggaggtaggggagtgcacagtgagctccttgagtttcatcttaggtggctgtgaaccagtcacttcacttagagagcccacgttcccttctgttccataatgtggtgggtgggggggtatgctcagcccacttgcaggaaacctgggaggctcagactctgtaacaccatgggatgctttgtgctctgtaatgccccccatacccaatgcactgcattctccaagactgctttgagggtctggttgcatctccagaaccaaggcataggggctgggggtccagaggagatctgaagatctggcctttcaggtcatcacctgcccaccttgagtctgtccaaacatcagtcacttatccagatgacccccctttgatacctcctctattcactcccaaaagccagtcaacacccttctatgagtctggccctctgcaagattctggacactatggtgtgcaagaaaggtggggccaggcagcaacttcaacctctcagatatgctgaaacttaagcctcaaggacaaacccagttacagagcctagtacccgatggtggtgcagcagagtgcttcaggtgtctaccctgcagaggacaaaaggaggccaggtcagacagatacagtagaaatggaaagagggtgtcactatctagcccagtgcagcggcactggatgggacagccatccaacattaatgcagctcacttgggggttcaagctgaatgcaagtcaggggacctaggggcaccaacgtagcacctctgctctgtctgtccctcactcttctcatgaaatcctgtccaagactgccactgtcctctgcaaccacaggattcccccagcctcccccttggctccagtaatcaggattccttcaaaagcccactgaagacccagggaccggtagcttttccacctgtaaaccactcaccctgtcagcagcttccctgccttcaaaatgaaaccaagatccaagccaggacccaaataaaaacccaagccatgggggaggtaaatctcctcctcctcttctttttccccacatctcttgctagaaagtcattatctatagcttaaaagaaacaatttctctatgggtttgtaccaaaaaggaaatattctatctgctttcttggcttcctctgatggggcttcacgaaaccagtttggtctgggctgtacggtgaacacctgtcaaaacgtatggaccatgccatttatcaaataatctgctccaagaacagataggcactatcagcaatctggtattgatctgtacaggcccctgctattgttcatccctgcatcccgaatggcagcaggaattaatgaaagaaacaaaacaatgcataccaatcactcagccgcacaactttgtttgctgctctcattaagttgggcaaagtttccccagctaacccaaaagcttgcttgggaggggtgggcccagaaggccaatcctctgattcaccaacagcccctctggctgtcccagttcctcttcctgacctccatggagcccttgtcagatgcccctgcacctttgacacctatggaagtggaggtgctagtggcaggcaaagaccccacctgggtctctacccgggtccaagcagagatagcctttcttctgacagcccctttgtggttgtgtttaagccacccttgtgcagggccctcctccacatacagtcttgcaccgggaagagatctgtccacaaacaacacctaaaagcccccagggagtgtctaggcatcggggagaaagagtgagtcaaaccaagccttccccctaaaggcaggtcctgcagagagatacatacgaatgcccagctgtgggcctccactaaacagtgagcccttccaacacacacacagtcactcctgcctcaccatcactgtccatacctgagcaggcttcaaggctcagcttaaatagcacctcctgaacccttctccaatccctccagccaaaattggtatctcccccatctgagcactcaccatgctttacctggcctataaaaagtagtactgtttatatctcctccatctataagacttatgagtagaggtccaggtaaaacaagcaaaaagaaacctctgaagtcaaggacatagttgcagtcatcattgcagccctacatagcatctaacactattaacaatgggtggatggataaatgaatggatgcatggatgacagataaatggatgaatgcatgggtaggtgagtgggtgaataaatggatggatagatgaatggatggatgaatgtatggatagatggatagatgaatggatgaacagatggatggatggatggatgatagataaatggatgaatggatgagtaggtgagtgggtgagtgaatggatggatagatgaatggatggatgaatggatgggtaaatgtgtggatgcgtaggtgggtggatggatggatggatagatggatggatggatggataggtgggtaggtgggtgggtggatgggtagatggatgggtaggtggatgggtggatggatggatggatggatggatggatggatggatggatggatagatgggtgactggatggatggatagataggccaatggatggatgggtggatgggtggatggatggatggatgggtggatggatggatggatggatggatagataggccaatggatggatgggtggatgggtggatggatggatggatgggtgggtggatggatggatggatggatggatgggatggatggatggatggatggatggatggatggatggatgggatggatggatgtggatgggtgggtggatggatggatggatggatggatggatggatgatgaatggatgaatctgaaccacgtgggacaaaaactcaagagtgcaccagttccatagcaatgagctcagagtgatggcatcctgatgatgggcagcactggggatttcacttttcttcccaaagcacaaaagtatctcctcctactttagccatagtgccaaaaaggagacactgaggtccagagaggatgaagaatttgctttggatcatacagagccagcctcaaccacagacatcctgaaaataaagaaacttactcgctgtctggtataatcaagaaccccaccccatcaccccttcaggacaaatatctgaaccccacttccaggaagttttaaggccatggcagaacaaaaccaccaccatagtcctgctaagtcagtgagtgcagctgagctcacaccacacctgagagacctgaagtcctgttctttttggaagcatgacttggagggatgccttggttgtccctgttgggggttcagagggtcctgcgtgtcacccgtactgagagagtgaggcctttcctctttggaggaccctccttgacttggaggaagcctcagcagaaaaattgccaagagtgaagcttttcactcagctcaagttttcaagagcggccactcaccccacattcaggagatgtagcagagagagtggcactgaccgaagtctcactcagctaagtggggcctcaagggggccaagagacacttacattctggaaaggcacagaccaaagggccaggctgggccagccagacatgtgacatgcaattctctgaggacagatggcaaatctccactcatgcagggcccaggtgtggggtcattcccccttgctcccacccagagtctccctacagtatcatctggacactgggtcctccccaagggccacatcacacgtctgcattgccaggacaggagaagcagcagcagcttctgtttccaagtaaagatgacaagtgtggatgaggagggcgggtaggccggtgggcggggaagagaaaggaaggaggagaaagtcagacagtgacagggaaacaaataaagctaaagccttggttcctgcccttaaggatctcagaatacagtggagaaggagaaccattaggtcacagactcaagcaaggacaagaaaccaaaccaaaggtcctgtaaccaaatgcaggttcagtcactcacccacccaccactggcaaagtcaaataataaagacgaggtgtggtggaaggaaagtgactttacttccaaagctagcagtggggaagcagccaggtgcatgcctaaagaaaatgcttcagctttttgggtaaagggtaagaactttaaaaagggattttggtatgtagcacatgcaggagtgactggggatgctagtctatgtgacttgttttgatgactgtcttgagctgttgccccatctggtgaatggactggcaccatctcaggtagaactgggttgcaaattaactgcagccttgaagtaatctccaggaggggagaattccacagtggcttgaattgttttaaggtttagtctccggaacttccaaacaaacacaaaattaaataagggaatcatcatgcaagcagtgcctggcagaagggagaacaaaggctattatctgattattagaggcaagaccaggaatgggcaggaaggagaaagaaaagaaaataacgtttaaaaacaggacacttgctgggcatgtggctcacacctataatcccagcactttgggaggctgaggcaggaggaccgcttgagctcaggagtttgcagccagcctgggcaacatagactccatctctacaaaagaattttaaaaaaaacagccaggcatagtggcacatgtctgtaccccctgctactcgggaggcagaggtgggaagatcgcttgagcctaggagatggaggccacagtgagctatgatcacaccactgaactccaactgagatgacagagcaagacgctgtctcaaaaaaaacaaaagaaaaaaaggtcacagtcccatgcttaggagtgcctcttcttcaggaattctggggatattcagaacgttaggagggattccctaaatccctcctttctaagcttccaaatatctcttgtccagagctcaccagtgggtaggccaggatttggggatagaactgtgttctcttgagttcctgcaggcaagtgccacaatgatcaaaggtggtacccacccccagtccagctgacctcagcaaagtcctgtcttccaaagcgggtcagtcctcacctgctcttctaccacaattcaggtagaaatgcaggttgagtatcccttattcaaaatgcttgggaccagaagcattttggatttgggattttttcagatttgaggatatttgcaaatataggatgaaacaccttggggataaaacccaagcctaaacacagaattaatttacatttcatgtacacatgaaggtaattttatacatttttgttgttgttttgtttttagaacaaggtctggctgttacccaggctggtctcaaactttcggcctcaagtgatctttctgccctagctgcccaaagtgctaggattactggtgtgagccactgcacccagcctacaacatttttaataattttgtgcataaaacaaagttttcttttggtttgtgttttgtttctttttttgagacagagtctcgctctttcacccaggctggagtgcagaggcacgatctcggcttgccacaacctctacctcccaggttcaagtgattctcctgcctcagcctctcgagtagctgggattacaggcatgcaccacaacaccaggctaatttttctatttttagtagagaatgggtttcaccatattggtcaagctagtctcaaactcctgacctcaggtgatctgctcgcctcggcctcccaaagtgctgggattacaggcgtgagcgacagtacccagccatgaaacacagttttgactgtgatctgtcacatgaggtcaggtgtggaattttcctcttgtggcatcatatcggggcacagaaagttttggatttcagagcatttcagatttcgaatttttggattaggtatgctcaacctgttcagcattcctgagcaggcaggactgctgggactcacgaaggtaggaatgaaggatgggttccttttcactgactcctgtcccattatagcaaaatccccaaaaccccgagaatgtgctggagagcaggggttccagaaggcagggagagggcctcacagggccttatccaaggaatcctaccaaattcaagaatgcagaaacggaagagcctctggcgtgagccccaggccactcagcaatgtcactcgctgtcccggttagtgccggaagcaccagggctccggatgtgaaaacccatgctgcacatccactcctgattgcactgggagctgataaagggaagtccaacccacagcaatgctgctcagtgctccggagaaagccattaggccaggtccccatgctgtcgtcagccactgagggttgacacccacatagaacccggagagccaatgggcacagcctggccatgcagccacttacatcacctttggaggcagaggccctgccatgctctgggacatgagcagctcaggacagagcacatggagctcaccactaaggctcatacattcaccaagtgaccgtcactgcccacacatgccccaccctgcccttccagcatccacacgcacctctgggcacacagccagtcccacagaggcctgacaccctgacactctcagcctccatcccagtgcccacaggcccgctcatctaggccaactccaagaaagctgacagagcagcaaaatccaccttcgtggccctggagcggtgacaccaggttcctcccagatggctccagtgagcccaggggccattgcaccggcacgctgcagctgcctctctgtaggaagataccactttagaaataggtcatgtgtgctgcctgcatccccttgaatcaaatgggatggtggcttgatgggttcttctcaggaccctgaacgccaaggtctccatcctgccttcctttccatgaccatatgacatcttcaccttggaaataagctgccagcttgctctgcaggcttgcttgagaagagctgatctcctctctctctctctctctctctctctctctctctctctctatctatctatctatctatctatctaatgctagcaactcatcagtgaacccctccctaggaaagcagccatttcaatcaaatatctgcaggtgcagagcctagggcatgacgctgagcaagatctcagaacatggtgggacggagacccataagatcacagagttgagcaaggacaaaaaaccaaaccacagccccaaacctggcagcatctctttgggaatgtcaagcgagatcccccaaatgcctccattctgagcttccaaatgtctcttgctcagcactcacccaggctctgacatcccctgaagaccccagcaaagcctggatatggaacaccaccatgggtggaaggtttgcagggagctgtgctctgtagagggaggcacaggaaagaacatttaggtaggacttgctcatcctcccaggcggcactgctgtcatgggaatgggggccacttcttggcaattaggatgtttcatgctgctcagccctgaatgctccaacacccataaggacccattcaatgaaggctagatgagggggcacctgaatggtttggatatttgttccctccaaatctcatattgaaaggtgatccccagtgttggaggtggggcctggtgggaggtgtttcggtcatggcggtgtattcttcatgaatccttggtgccctccccatggtaataagtgtgttctcactatgttagctcacccaagagatagttactaaaaggaacttggcacctcttcttctctctttcttggtacctctctcgccatgtaacacccctgctccctgtccgctttcccccatgattggaagtttcctgaggcctcaccagaagccaagccaatgtggttgccatgcttgtacagcctgcagaactgtgagccaaataaacctcttttctttataaattaccctgtctgagctattgctgtatagcaacacaaaatggactaacacagcactcaagcaatttccacccccacatcccctcctctgaagccatgactgaggtcacacagcaaggccaggatgtggaagaggttagccactagaaagtcactgtctctctgtggcctggcttggtttgacatgcacaaattattttttactttaattatcccccatttaaaaatcaggaggctttgctttttagtctgtactaccacttctacataaataatggaggactaggcaattctgggttgcattcctacctggctaggtcagctggggcagggcagcagtaagtggccctctctagcccatgccactgatggcactacctgcctggcccctagaggtatctggtttgcaactctggggtgaagcatgactgcagattgagacatgatatggaagtttccagagggccagtggggtaacagttggccatagtaagccatgcttcctggtgaccctaaaattatgtgagttggagagcttattcccctgtgaaggatgctctcctgcacgtcaccaggtcaccgggaagccaggaaaactttgctgactgggagagcagaattttcagagaggcaaggccaggtttctgggaatccctgggcaatggggccagcatcctggctattctggattttactgcaagtgttcgcagctgatgcctgtttccaggagtcaggcaggcttgctttaaatgcaaagaggggccgtgattgactgcagagatccagtaaacaaagagggttaaaaaaataaagctaggcttcctgtctgccctttgcacactaacagctgctgtttgctcgggcttccacatgagtaacacgggcgccctgatttctattatacagaacattaataagaggaagcactgaccctcgattgctgagaaccaggtaaatgatggggagggaaagcggccgagaaatggtaagcattttacaccgcacgacttgaaggggaatgcgttgactataaagatgacgggtgttgtagcaccgaggaaaaaaacataatttttcattgatgtacggcagccaggctggaaggaacacaaacactacagtagatccattaactggatgacaagaaacagtgttcacatccactcactaaactgtttttgattctttagtaccaacatgcagaatgatccttacattatgttgccagggaaaaaccttaaaatgcatttatttcataatgtaactttcttgtattatcataacagagccacaacagttgttgcaaacactatggggtctaaaaaaacacctaagtacagttattaaaggggaaattttttcaaagggggaaatgttgtgtgtctacaaaagtaaggggaaggagggggatacagctcaccttccacctctccttctggccacgggagttccggaccctgagcaccctcagtcaccgcggggcagggctggggaggacctgggagagggaagtggaagacgtgaaggtattcatgcccagtcactctgtgaaatggaagatttgcagggatggataacagtcactgctgccatctagactctggctattccattcctacccttcacatgcccctgtacttcctcacctactcccggtaccctggactgtatgtcccacctatataatggggacaaaaatggtcatttggggcaaggtgttgtggctcacatctgtaatcccagcactttgggagaccaaggtgggaagatcccttgaggccaggagttcaagaacagcctgggcaacacagcaacattgtctttacaaaaaaaaaaaatatatagctagatgtggtggtggctcatgcctgcagtcccagctactcagaaggctgaggcaggaggatcacttgagtccagcagtttcagaccagcctgggcaacagagtgagaccctgtctctacaaaaagtttaaaaataagtcgggtgtggtggtgcatgcctgcagtcctagctactcaggaggctgaggcaggaggatcccttgagcccaagagtttgaggatgcagtgaactgtgaccgtgccactgcactccagcctgtgtgacagacactgcactccagcctgcattacagacactgcactccagcctgtgtgacagggcaagaccgtaactcttcaaaaagtgtttaaaattagccaggtgttgggttatgcagcctgtagtcctggctactcaggaggataagaactgcctgggatcccttgagcccacaagggtgaagctgcagtgaactatgattgtgccattgcactccagcctaggtgacagagtgagaccctgtctgggaaaatttaaaaaaaaaaaaaaatggccagctgatgtcacatgcctaggcatgtgctcagcagtaaatgaaaggttctaaggggcattcaaatgcactattctgaggggcactgatttctattacatacaacattaataagaggaaattgtaaaaaataaaacattagatgggtatgtacgctattgtagtcccttaaaatgggacattccaatgatgctctcctgggcctcaccaggtcacctcaaagccagtaaaactctgcttcctggcggagtagaatttccagagaggtaaggcccagatctctgggagtccctttgcaatgggaccagcatcctagttccctggtcttaaccaaaagggtgtcctcaggaggcaagagtaagtttccaggaggcaggtaatttgtcttccccactgtggtcaccaagcagacagcccacacccagcgactctaccatagccaggctctgaaggagccagccccagggttggaatcttggctctgctacatcctccgaccccccagaatggtagttctcattagtggtactactatagccaatacactccatttccagcacagagctctggtgtgagtggtgccccccaccaggaaggaccttgcctgctgccactgaaggcagtgaggagagctgtggcagatgcaaaaacaaagtgtgcggcagtagaagagcaagtgaggaaggcttcctggaggaggcagcactttgagacttggggtttaacagacacatgagtggcaaaggcattctcacaaaatgagcaggtagacggagacgacgtgtgcaggtggcaggtgggattgtctggggcagccaaagcccagcccatgcatggaagacagctggacccgaggctgcagagaggaggggcagggtaggaggtatggagagcctggtgctaaggccagcttgcaggctggcctccgtgactggctggaaatagtgagtgggataagaaggaagggacaggagtgacctctcaacttattttcttccttggatccctgggtggtaggcatccacatggggaagccgagccaatttggaggagacaatgagatgaccaggacaggtaataacacggaggataatggcaatgccaacactgcagacaacatcagtctttccattgaatgaggcaaaatacaaaaagaggtcgggtgcagtggctcatgtcactaatcccagcactttgggactctgaggcaagagggtcgcttgaacctgggattttgagaccagcctgggcaacacagtgagacccccaactctacaaaaaatacaaaaatgttagctgggcatggtggctcatccttgtagttccagctattcaggaagctgaggcaggaggattgcctgagcccgggaggtcaaggctgcagtgagctatgatcgcaccactgcagtccagcctgggtgacaaaacaagaccctgtctcaaagaagaaaagcagaagaaggagaagaggaaggagaagacagagaggaagaggaaaaagaggaggaagaggaagagaaagaggaagggagagaggaaggatagaaaatcccaggtagtgtgaagatgtaaatgtggcaaaacaaaaaccataaaaccccaggtgaaaattggatgaacatttttataatcttggaatagggtggattcacaaaatatccttttttaaaaaaaaaagtgtaattcttttttataaggggtacaagtgcagttttgctccgtggatatatttcacagtggtgaagtctggccttttagtatagccatcaccccaagagtgtacataatacccgttaagtaatttctcatccttcactcctctttcacccttcagagtcttcaatgactactcttccacactctatgtccatgtgtctaaaatatcattctaaagtcacacctgctgcccaaaccatcaccatgacctgcccctcccttgggctaaaaacagctttgtcattaagactgctttattaagatgccaattctccctgggaggtgggatcacctgcagaagtggcttatgggctttctttccaatcctacaatgcacaggagaagcgacggggcttggcagaagacatcttggtttggaagtaaggaggagagctggggagaagacatgatccttggaaccccaaggagggacagcagctcccaagatttctgggttgcaggagggggatttctctgccactccctccccacgaggaacccagtcctgtgccctgcgttgtagatgataaaaagatcattacgagtcgatgtactacatgaataggttcagtgtctaggggtgaagggaaggcccagacttaaactcttctgaccaagttagtctaggaatcaaacatgtcctagccgagagagtcccgtggcatccaaaggactctgaaatccctccaccagccagattccctctttcatgagacttcatggaagttgcctgttgatgctagttcacattttaacgtcagatcacctagctgggtacaaaagggaatcagtagaacctagagaatgcaggtaaagtagccgttttctgctttattgctgtggttcagctcttaggctttgacaaaggtgatggcttctggggctgggtgcagcggctcacgcctgtaatcccagcactttgggaggctgaggtgggctaatcacttgaggtcaggagttcgagaccagcgtgaccaacgtggtgaaaccccatctctactaaaaatacaaaaattagctgggcatggtggctcatgcttgtaatccgagcactttgggaggtcgaggggggcagttcacttgagatcagaagttcgagagcagtctgaccaatatggcgaaaccccgtctctactaaaaatacaaaaattagctgggcatggtggtgggtgcctgtaatcctagcctctcgggaggctgaggcaggagaatcgcttgaacccaggaggcagtggttgcagtgagccaagatcatgccacttcactccagcctgggtaacagagtgagactccatccccctcaaataaaagaaaggtgagggcttctaaggccagacttcagccccaaatctctactggctgcctcttgggatatacagaaacctaatctccaataggcattccttgaagcaaaaaataccctattccttacttttttatttcattttaagggactttttttggttttaattttccaatgaacatggtttgcactaacatgataattgcactgaatatatatatatatatatatatatactgtttcttggtgtgattcccatgaataattcaacatgagaggtacgccttggaaaattatcacatgaaattcacagagagaagctagaaccaagttggagggtcagctgtctaacatcttgttatctgtccagaagtagccataaattcacgcaaaaagcaaaatctccggctcctgggagcagaagggtcgctggaagccaatcaggaggacatggctttatttaattgaggactaaatatctttgggattgttgtttgtctcccaaggacggtcactttgctgtaaaggcaatgtcagtgtttccctggtggttccattccctggttagacccggatttcctctctgcattacatattccatattataagggtacaatctgccaagccagtatttggattctcagcatcgtaccccatatcccggagcccatgttgcccccttccccgcctcagtcaggtactcagaggcccccactcattagccacagagtcacagagactcgcatggtattaagacagcaatatcatcttattggctattagcacaaatgtgccaataaacatagtgcataaaaattatacatattccctcagagtccataatcccgaactgatatggcataatgcaaaacacacttccccaaaagtagtgcttaaagtcacggtgtacaaattgaattttaaataaatttcctgaaacatcatcagtggttctggccacattagcaatacacatttgctaaaaataaagtgcagaatggctgtgcccagcccaaccccaaagggatgggaccagtgggcatttatttgccctcaagtggtttcagagttgggctggctgcacatgtgttcaggtgcagttgttacaacagcccaatagcttcccctcaagggtttcccctaattatcagtgatcatcaggttccaaaagtcagcttgtcttcacctcattctctatcaaagagggagatgttaattgcattatcgccttgccaacaccctctgaaatgatggcagtgatcattaacagcctaccacggagccaatcagagtcaatccaaattcagaaccagccaatggagtgcttcctaatcccacgtgtgtgtaaacactgaaaacataaaaacacaaggcagccattgtggagaatggggtgctgggggtgctgaagaccagatccgccatcaactccataaaatatttcactggttaatacaaacacacacagacacgcatacacatacacacacacacatgcacatgcacacaacgcagtgaaaagctagaagatccccacaagccttatgattttttcccccagccctctgcatcccagaccaagctaattgaccagcaaagaaattcaaagtaatgcccagttgtctggttttatttaatgaagaacctctccaagaatgctgtcagcatgtcacctttcacagataaataaatatttgtggttccttgcatgttagtttcagtagacaccaagaccaaaaataatttgcccttgttcacttgacttcctttcttaaatgtacaaagtaaggctgtggttttcctaagtgtgttctcgttcatggctcacctaagaagatgccctttggactgacctagaatccaactatcaaaatcctgctcaaaactactcaagccctggttcaaaccccaaccccccatatctcctttttcaaccccatccaaagagggatgagtcattgaatagttgatatctttctgctgttaagagcgctttcaaaaacttaatcctcaagggaaaagtgggcaaataaacaacgcacaagagaagaaatatacacacacaagagacgtatggaaatgtattcaaccgccaccataaaagaaattccaattttaaaaattttgatctatcaaacaaacaacttggcagagactacctcttatttggaaatctaggctgtcactctcccacaaagctcacagagccaaacttaccagggggacaaatatttcaaaataaaggggactcactacataggattttctcttctaggacttcaccttaaagaaatatccagagggcaccaagtgatcaatggttaaaaaaaaaaaaaaaaattggccacaacttcactagtaatgtgaaaaaatcagaagcaactcaatgtttgccaaaaaggaaatggtcaaacaatatgatgcatctgtcagaagacaaaactgcaactgacccttgaacaacatgggtttgaatttcttgggtccacttacattcagattttcttccacctcgccatccaagacagcaagaccaacccctcctcttcctcctcttcctcagcctactcaatgggaagatgatgaggatgaaaacctttgtgataatccatttccacttagtgaacagcaaatgcattttcttttccttatgacttttttaataacatttttgctctagctcactttattgtaagcatacagtatgtaaaacatgtaacattaaaaatatgtattaagtgattgtttctgttattggaaggagtccagtcagcagtaggtactagtagctaagttttagggaagtcaaaattatatgtagagtttcaaaggcacgatgggtgggtggagaagaatgggcatccctaacccccagggtattcaagagacaacagcacaacaaatgagtttaaagtgctcaattggctttatttgcaattctagaaccaggcaacactttattccaaaacacagaatgagtaatccagtgagccccgcagaatttgctttattgacagagaaggctgaagaaagcagaaacaaagaacaaagggaggattcgttacttttagacagaacaatagaaaaataactgattagttaatatcaggttactccaggcttccttttttgtgtgaggattaaagcagagggaacttcattatcatgcggattgaggactgaaacagacctgtttgggaaagtggctgttatctctctccggatttctgagaaggtcagataacaactgagtttagttttggtgacggggaactgaaacagatccaacacttccttagacagtgctttcggataaacatagatactaactcttctgctcttaaagcttatttattttttgttttgttttgtttttaaaattttatcttactttatgttctaggatacatgtgcagaaagtgtgggtttgttacatgattaaatatgtgccatggtggtttgcagcacctatcaacctgtcatctaggtattaaaccccacgtgcattagatatttgtcctgatgctctccctcccctcgccccggcaacaggccctggtgtgtgttgttcccctccctatgtccatattttctcattgttcaactccctcttataggtgagaacatgcggtgtttggttttctgttcctgtgttagtttgctgagagtggtgatttccagcttcatccatgtccctgcaaaggacatgttctcattcctttttatggctgcatagtattccatggtgtatatgtaccacattttctttatccagtctatcattgatgggcatttgggttggttccatgtctttgctattgtgaatagcgctgcaatgaacatatgtgtgcctgtatctttgtaaaataatgatttatattcctctgggtttctacctagtcatgggatttctgggtcaaatggtatttctggtcatttgtttaatctgaattccttcctcaggaaaacactcccagaccccacaaaaagtatgaaagaactgaaactcaccagatcaccacatccagacaaggagatgccagacccctcactcatcatgattgcctcctcaccattccccagttcctattttccaacacttgttacatttcttccctgctgcataagcctctaattttagacagccagggagaggaatttgagactgacctcccatctccatggctgcaacacccgattaaagccttctcccttggcaataattgttttctcagtaattggctttctatgtggtgagaagcagggcctagacagaacccctggtgttttggtaacagcatgttagaatgaggaactccattttgatttttagtctggtctgttgaagcctagtgcagaagcttagtcgaaaacaatagcctcctataacttttatttaacacatctataaaatgcaactctgtgaattcttaaaatcgaaccaaaaaaagtctgaaaaccatcaaggacatagaaaatgtttacaatatgttaagggggaggaaaaaaaagggcaggatataaaaactatatgtatagttgaatcccaattttgaaaaaatagtaagacatctaaatgcccacaggcctgtaaagaaatgcataaaaaatttaacaaggtttatctctggatagcgggattacaggcagtttttattttctgcttgaaacttccctgtatttctgaatgttcaaaaataaatttgtattactcctatattcaaaaagcaatgttttgcttttgttctttacaggctctgaacccccacagctcttgctgtcagaatgacttaccgcaaactgcacacgactccccagctctgcaagaactcgttctggcttctgctcctggctcagcctcctgaagcccaggaatcaaggcttctcctcccttgctcctcacccaaggtctatgggcttagctcttcttcttgttctttagatttaaggggtacatgtgcagatttgttacagggatatattgtgtgacgctgaggattggggtacaagtgattctgtcaccaaggtagtgagcatagcactgaataggtattttttcagcctttactccctccctcccctctagtaatcctcagttgtctgctttccatctttgtgtccatgagtacccaatgttcggctcccacttatgagtgagaacatatgacatttgcttttctgtttctgtgttaatttacctagaataatggcctccacctgcatccatgttgctgcaaaggacaggatttcattcttttttgtgactgtgtagtatttcatggtgtaaatgtgccacattttcttcatccaatccactgtggatgagcacctgggatggttccatgtcactgctattgtgaatagcactgcagtgaacatacatgagcaggttcctcttttgaattcagttccttatttttgatgtttgccctcaattgcccacactctgaccacttagctcataccaacaagccccagacaaggtgtcttgtttctgaggaattagagggcaggaatagggaaaggaagaaagaggaagtaaaaggtgtaagaaattctccttgctcatgatagaaagctgtagacccagcttgggcatgcgtttcattcacagggatttctttttagggggttatatatccagctttattttttattataatcttttttatttgtatgaatggatagggtgcgagtacaatcatgttacatgcatagattgtgcagtggtgaagtcagggctttagagcatccatcctctaaataacatgcatagtacccaatgagtaatttctcattatccacctcccgtccaccccacccccttctgagtctccatcgtctaccattccacgctctacatccacgtgtacacattatttagctcccacatatcagtgagaacacgcaatatctgtttttctgtttctggcctgtttcacttaaggtgacgacctccagttccatccatattgctgcaaaagacatgatttttttatggcttaatagtattccattgtgtatatgtaccatattttttccacccatttgttgatgaacacttaggttaagcagtactacaataaacatacaaatgcaggtatcttttttgtataatgatttcattttacagaaatttcttgataattagttgtcataagagtgagggatggggtgatactgtggcctgcagttccatctgtgagcctctgccttgggtggcctgaaaaagatgaggattttcaggccaggtgtggtggctcacaactgtaatcccagcactttgggaggccagggcaggtggattacctgaggtcgggagttcaagaccatcctggccaacatggtgaaacctcatctctactaaaaatacaaaaattagccaggtgtggtggcaggcaccgtaaacccagctacttgggaagtcaaggcgggagaatcacttgaatccaggaggtggaggttgcaatgagatgagatcacgccactgcactccagcctaggagacagagtgagactctgtcaaaaaaaaataataaaataagaaggaggaggaagaggaggaggaggagaaggaggagaagaagaagacagggattttcttctttccattgggacctcagctcccaggtgggctgatgatcacatcaccaaaccaaacgtaattccagcaatggacagagatacagaattctgttccgatactacagtaaaatgagctatgttggacttagggtcatcgtctcatacaatactttcccaacaggctggcaagggaacagtggctttttcctggttttactttgcacactaccttggatcctacccctgagtaccctatgaatgtgccattttgtttggtcctgaagtgtgtactttccccatcctgtcagtttcctgggaagactgtcagtgcccctgatgccctgcgcctccctcacaattttcctgccattctcccaccctggccagcagtgggagcatgccccaagcagcaggggggtcgtcccaccatcatagctattgccggcctgagatgatagatgccactgtggaagggacagaagagcttccatctaaccgctcctactgacctcaccatcagtgatgcagatgtacttgtcacatcataaacacttggcacccattggctcttccccaaatggctatcagaattgcagtttcagccaccagcagctctccgatgggcacaggctccacttatggctggtttggaatggcaaatccatcactctctttgcctgtaaaatgccaaggagactgatctaagcagggggttcccatccatggcctgctctaggcctgaaggaacacagatggcatttgcaggaagatgacatctcaccatccccatctgagcaaagcctgcccatcaaacaaccaaaggatagccagtcccctgcacagtgtaaagtgacttgcagtgatcctcttccccaaggccagccccagctctcagacctccagtcccaacaagtctttttttgcaaaggaggctcaccctggaacatggctctcccaaggggagacaggaacggatgttgacttcatcccagcagcttctgacacaatgccactatctttcaactttctccaccaacagggtcaggctgttgattggcctcgactgcagttagcctgacacggctagcagcctcaaaacaaattaaacgaggcagggatgccgtgcagtgatcgttccattatgtcccctctgcttccacacgtgactcacactatcacttttagaaggtgaagcatcttattgaatcaacacctaatctgcacacagtgtcacggaggaggggcgaggggacagcgggagcattttctctgatccttttctttcctgaagacttcgctggagacaggctgggtgggggcgaagatgaattgtgaggaaccctgaccctatttcaggtaagcttctgatttactgttcattgtgctttctaacgaataatttttatataataatgccaccagtaagcaccaaacccttcttcttgggaatgcaattaagggaaaaaatagcaataaattgttttcagtacttaacccagctccaaatttatggctgctgaaatttattgtttcaggggcctgaaaaaatggcgattaattttattccatttcctgccattcaccctcaaaactgaaatataaataaggagctgttctcggcctcgggttttcctgcctgttagaaccctcaaaactacagctctccagacagctacctctgaaggctcctgaagcttagaaacagagaggaaaacacccctttatctgcacgtgtctccaccactgcaattgctggaagctccacgagtgccctcggtgcacagatgtgctttacaacagagtgactgtaaatgagaaaacactaagttaggctctgacggccaatgctggatgtatccgtttgccctataaataagcactgatcacctccattttattgaactcattttctaggcaagcaaagaccacaagattcttctgcacattttctctttacaccctctagtactgctgctactgtcagctccgacagatttatagcccattcattcatgggaacaaaaaccctgccacggctggtcatgggacacgcaatagcagttagttcaaaagataacagctgcaatacctcacctctccattcagcactacagagccagcactacttcggaggtaataaatgcttcttgttagtgtgctttgagtcataatcctggaataactgtggtcggccttaccccgggccccgcccctagggaaaccgctttctgccactccccaacacccaccccgcaccttcactccagcccctttctgccagaaaagaggggagtggggggttgaaggcagcccactgcgtaaccaaaaagtggaccctgtctcctttttccagtccacccaacacaagctgggttgctgaacctttgcaactcaagcacttaggcaacgctgaaaagccgagcttcctcgtggtaagtggcaatgtgggtatatacattctccttgcaaactgatcagaaacagagctcgggcatgagtcctgtcccgacaagaagaggcagctggtctgactagtccaccaccatcctcagagcctggacacacacaacaagcatgtattaaaagaatccatggattttttttttaagtagtgaatgacctggggaggaatagaggatcggttccaccccgctcactcagagcaggaaaaggtttaatgcaagaagcaatatagtggtgaagcgttctgcctcattttgaagtcggcctttcccacccacaggcctcagtttactcatcttaaaatggggatgttaactgtaccgattctaccaacaaatcagggatttgttgctagaattaaacataaaaagtaaatacctttaaaaatttatcacaatgctaaccaagtagtatgcgttatcaaataaattaattagtttagttggagaaatcagatatgcacacaagaaacttaaaggaagatcactagaagacaaggtcattgacgatcaaactttagggaaatgtcttccatttttgaaaccctccaacaagacacatacacctgcccccacctctacctccaccagcgctctgtggcctatattttgcagagatgtgttattgtcactgttagtctgatgtcccgacaattaaactgcaaagagaaaaaggccagtcatgcagaaatccaacagcctggcctctgggatccgcccaccctagcaatgggtccaggtgggagatgggtcatggagatatggctggcccaggtcaggcagttgaaatggaagttgagagcctccaggctccagaaggcaccagagagagaagcaaagtcaaactccccatgaagacacacagttcagtggggaaagagtagactgtgaaacgcatagaaaaagacactgggcattagttgctatcagtacattcctccctaatcaatcagctttattgtgacgcctctagctcggctcataaggcctcagctcataaggccggaaagccgcttcggcagcagtttaaaatgtttccagtttaataatccctgctaattgaaagcagctcagaaaagcggggaagatgggggttggaagcaaaccagcaccgtttatggcaacagtgctgttcctaggggaaacaaaataacctttgatgctgcagggggaacctgcctccccgtccccaaacaaactaattcccacaactgtcttctttggcacgagagctgtttcttcttacgttttaattgtataatgttatagcagccgaattgctgtgaaatctgtttttaatctgtggccccctgctgcaaaaactggattattttttcttcaacagagaattacattcatttttataattgttctttcctttcaaatcacctaatatgacaaatgctggacaaccttacagctcatctgctgaagagtgtctttatgagttgaggcttcaatgctttcatggagaaattgcctgatttaagtaaatcatgtcactttcacccttgcaatcgtatttgtttcagacgtctgctgacctaacctgcagagcaaaaacaaaacacgtttacatttctaggctgagatatttagttcaaacgatgtacaaataggtcataatgaaaagtaattttagtacacggcaaaggtatcatttaagtatacttttgacagtttttacacatacataattattccagtattgtaatttaaatggataaaagacagatcttagcacaaaagcctccatcctggtttctcggaattccctggcagagctacagttggggacatggatatagaagaaggatgtcatgtgtctgatgtaccatgaatcagctgggctcaaccttcaccctttggatccatgcaaacctaccctagaaggtggatccagacacctagatcttttttttttttttttggtattttctttttatttttgtgaatacacagcaggtgtatatgtttatggggtatatgagatattttggtataggcatgtaatgcataataatcacataatggaaaacccatcccctcaagtatttatcctttgtgttacaagcaatccaattatacgcttttagttatttttaaatgtacaattaaattattattgataggtcggacaaacacagcctgggtgacctggtcctgctgtgtccccacccaaatctcatcttgaattgtagttcccataattcccacatgttatgggagggacccactgggagataattgaatcatggaggggttcccttttagtgttctcatggtagtgaataagtctcacaagatctgatggttgtatgaggggaaacccctttcgtttggctctcattctcttctctcttgtctgctgccatgtaagatgtgcctttcaccttccaccatgattgtgaagtctccccagccatgtggaactgtgagtccattaaacctttttttccttataaattgcgcagtctcgggtacgtctttacgagcagtgtgaaaacagactaatacaccaagcatccacctgcggccacaagaggatggctttgtattgagagacatgatatgtaagtagcaacagaagtgtaaatctgagtattcctcctcccctccagaaagacttgaaacatggaactggagggcactgagttttttagggtgattgccagatgtgttgattagtgaattaaacaaggctgcattcacaggaaggcaatgtccgacactgagaggtgcccccccgtctgggctggagtagttccttttgcagggaaacaaaccagctgaagtatgcctgggaaggaggaaacaggacagttttccaagtgtcatagctgaacaacaggggaagaaactggagaagagagaactctaggaaataggctttctgtctacaaatccccctggttaaccattccagagcccttgctgcctactggaactgagatgagagctttgcacaagatcttcctcatgcctcactgcattgtcagttgaagataagcaggaccatggtcctcgggtgacagatgagaaactgagactttgggagggccaatgactcacccaggatcatctgctatgacatgatggagcaagagttcatacccagcatcttgttttgattctccaatctcacctaaggtcaggagttcaagaccatcctggccaacaaggtgaaaccccacctctactaaaaatacaaaaatcagctggatgtgatggctcatgcctgtaatcctggctactcaggaggcggaggcaggagaatcacttaaacccaggtggtggaggttgcagtgagccaagatcacaccactgcattccagcctagatgacagtgactccgtctcaaaaaaaaaacaaaagaaaattactcaggagacacagccagtgagaacaaaacgggaattatttttaaaatttaatagagccaggatcttgctatgctgcccaggctggtctcgaactcccacgctcatgcaatccacctacctcagcctcccaaagtgctgggattacagatatgagccaccacgacaggccaaaatcagaatttttataccagataatttgactccataacttgtggtgccagccactgtgctgtgctgctgcttctgtgtgtatatttatgaaccagtttgtcttgaggaattaagaacccaggtgtgccattcattgtgcgtagcaagaagcttgatgctgttttatcactgaatcatcccaacaatccaatgaagttgaaatgtttgtcccacatatcagaggggatattgaagcacagaaacttgaccagaccctactgctaataaactcagaaccgggatctgcctgagtccctctgttctcctgaggatgaagatctgctgtctaaggatgttcaccaaggcaggtcttaggcttagaaggcgacccagccccatctggagcctccttcccagccaagtctggcctgcagtcatttgtctccatcaggcacagccattgttctccaaacttcctggatccctcttcctgaaacaaaaaccttcagttccaaggaagccctcactttggagagaacaggaaggcacagtttcatctttggcacttctcaggcaatacttcctcactgtccaagggcaaaaataaggtggatatagcccaaaaaagggacatagtgctctgagaatttagcttggcttggagaagcctgggaatatgtatgcatacacacatacacatgcacacacacacacaaatacacacaaatgcacacacacacacagagtttcctatgttccaaaacaaaccaaactttatgctttcacctggtaccctgcagccctggagttttctcactttcaacctcagacccaaagaggaacaaagagaaagggaaagaaaatgcctttgggttgagtccatttgaccctgatccatccagaggaggtaatgagggcatgacaagttagtggccagacagggacaatgatggcacctaattctctacatagagccaccctctattcagggaactctctgctagtccttttttttgttttttagacagtctcgctctgttgcccaggctggagtgcagtgacgctatctcagctcactgcaacctctgcctcctgggttgaagcaattctcctgccacagcctggggactacaggcacccgccaccatgcctggctaattttttttttagtagagatgaggtttcaccatgttgaccaagctggtctcgaactcctgacctcaggtggtccacttgccttggcctcccaaaatgttgggattacaggcatgagccaccatgcctggcctctgtacaagttttgaagcttagtttctctgttatacactatcaaaacactgggagcacacacacattctagaaggttgatatcattaaatacctctcttcttctgtcatggtggcaaaaagagaaggaagacatgcttcccttttacttggggctgccataacaaacaagaaacaggtgctcttcaacacaggggaaattccctgcttgaggagcctctggttgtgggtcacagaagctaaatttggggccaggtatggtgaagcattcctgtagtcccggctacttgtgaggctgaggaaggaggatcacttgaggcaagaatttgaggctgcagtaagcagttatccagcctgagggacagagcaagactgtctcaaaaaaataaaatggagtgttacaaaataagtaaataaaaattagttttaggctgggcatggtggctcacatctgtaatctcagcactttgggaagccaaggtgggcagatcacttgaagtcaggagttctagaccagcctggccaaaatgatgaaaccccatctctaccaaaaaaatacaaaaattagccaggtgtggtgatgcacccctgtagtcccaggtactcaggaggctgaggcaggagaatctcttgaacccgggaggcagaggttgcagtgagccaagattgcaccactgcactccagcctgggtgacagagtgagaccctgtataaaaaaaaagaaaaaatatttaagagttttaataaaataagttaacttggcaaaggaaagcaactgccaatctacacttttccctaccctctttgactgggcctgaaatatctacataggcatgccacactctctctcagaaccccctactggataaccctatgacctcccccatgtgggagagaaaaaacagagaaatcacaagacaggtggaaatatgtagccattcaagatgcatacataaatctgcacaattagagcaaacatcacattatatggcagagttagtgcaagaaacaggagacaagtgcaaagatgctctaggtgtgtccttccgagacatttcaactacaaaactctggcaggtagtataaaagagaaaaatctaaaaatattgcttttggatcgagaaatatgattgacaaatttttaaatggagaattagaagacaagctcaagagatagtaccaggactcaaagataaatgcaaatgagaaagaaataagaaatagcaggcgaggcgggcggatcacgaggtcaggagatcgagaccatcctggctaacatggtaaaaccccatctctactaaaaacacaaaaaattagccgggcgtggcggtgggtgcctgtagtcccagctactcgggaggctgaggcaggagtatggcatgaaccagggaggaggaacttgcagtgagctgagatcgcaccactacagtccagcctgggcgacagagcaacactccgtctcaaaaagaaaagaaaaaagaaacagcaggcacttatcctggatataacagtggtttaaaaggaaagaaaagaagagtggaaaagcaataattaaaaggaaaacagaaatcttccttagggcacatgaatagggacgtcttcaaggtagaaaaggatctctgggaacaaaatccttacccagaaggaactgatacaggctatgcttcaatttcacacaaaaagacaaaagccctgtaagtaactaagcacaaaatgtaaatgagctggaagcttctattaaaagacttagtttgggtcaaaaacaaaatccagctttgagctattacagaggaacaaacctataataaaatgttccgaaaagctttaaaaatttatgcatttattcattcaacaaataaatattgagttttttccatgtgccaaataaagtgatgggcaacgacttaccaggcaaacacaaacaaaaataaatcagagacgataatattaatatttaacaaggtagagattaaagcaaaatggtcaaagtgaacatttttctcttgatctttgccaggtataccgagagaaaaaaagaagatttaaccaatattattaacaaaattgaatatatatatggtatatttacacatatatacatacacgtatacaaaccatatacccaaaggtctaatacagtatttgaacaaaatacatttgaatagtattattaataaacttgaatacacacactcacacacatacaaacatttcaaacctatactcaaaagtctaatatagtagccactaaccatgagtggctatttaaatttagattttaactaattaaaattaaataaagtaaataatcagttcttcagacccactagccatgttttctgagtctagtgggtactccaccagtcagggcgggtatataacatttctattgttgcagacagttctgctggacagtgctgcatacacaaggcagtttttaaaatgctacatagcatctacaaagtgttcctgtaatataacatgcacaaaagaaggataaactttttaaaaatttaattgagattagtaaataaaaatcaggatcttagcacaagacgtgctcattgttactagcgtgtcattgtttctaggacctctcagcagacagagctgggaaatacatgcacatgtacacacacattaaataggcattaatatttatttctgtatctatagatgatggtagatgatagatagatagatagatagatagatagatagatagatagatagatgatagatagatattaaaaaccatgagttcatctgccccttttgattccaattcagcacaacaaggtacatttcttttttttttttttttgagacggagtctcactattgtcacccaggctgaagagcagtggtgcaatctcggctcaatgatggaacctccgccttcttggttcgagcgattctcccatcttagcctctggagcagtgggactacaggcatgtgccaccatgcctggctaacactggctacatttctaacctcctcctctgcatgtttccccaatagtgagaaacccagttcccattatcctcaatacatggattcacttgctcatcctagaagtcacagaaggtgggttcaaaattccaacccattaccattgcaggaaggaaaccaactggaagcaacaccaatgaggaatccgtatttgtttaccactggttggttggtcagttagttggttggttaattggttggttctgcgtagggctccttggagaaataactgaactggggcagggaaaatccaagatgaccctgaaacagctttctgtgtcagaaattaaggaagcgctcaaagacttataaggatttgtcaaaaggagacaagaaccagattgaaggaatctcaactgccaaatctaggacaatttgaacatcaaaatatatccttagaggcagaaggatcacttgaggccaggagtacgtatgagaccaggctgggcaacacagcaagaccccattaccacacaaaaatttttttttaattagccaggcatagtggaacataccagtagtcccaactactcaggaggccgaggtggcagggtggcttgaatctgagagtttgaggctgcagtgagctatgatcacaccactgcactccagcctgggtgatagagtgagaccctgtttctaaaaaaatatatttttaatgtaatgatggtaatgtgttataacccattgaataaattaagagttcatgcatccatactgatataaataagtaatttttttttaaattaagtaagtggggagaaaaagctcttccctacagtacaatgctcattgataatatagaatgaacgctgaggttataaaaccatcagtgtatagtaaaactagtgggtgggaatttgatgaagaatatttacacagtgcaaaagtatctctccacaattaattactagttacaaaggagaagatagtaactttacagtggaggagccagctaggcaccaccttaaccaagtgatcaaagttagcagcaccgatattggaagaaaccaagttctgtgcctcttcataagatgcactcagaaaggcacgatgtcacttgtgggtattcctgttagaagtgcataaaccgaatctataaatgaagagtcatgaaatacacccaattgagtaactgttccagattaacgatggctaaagagacaggacaactgaatgcaactcttgatcctggaccagatactgcaagggaaaaaataataactagaaaggacaatattgggacaattgacaaaatttgaaaatggattatgcttgttttgaataatggactgggagaatctccaagtttctctttcctctgaaacaaatggcacagggattgtccatgccttgatgtttggaagaaattagccttaaaattttaatctagtgtcttgtttcggaagcagtcctttgacagtctttccagttcttctatgtttattagtagtagtatctttagatttttcaatatttcttttgttgacagttttggtaatccatatatttccaagaaacttgcaaatttagttaatagtaccatatcaatgtcaaatttcctgatttgggtaactgagctgtggttatgtaagagaatgccctctgtttattagtagtggtatctttagatttttcaatactacttttgttgacagttttggtaatggtaatccacatatttccaagaaatgtgtaaatttaggaaacagtgccatatcaatgtcaaatttcctgatttgggtaactgagctgtggttacataagcgatatactctctgtttactagcagtagtatctctagatttttcaatatctgttttcttgacaattttggtaatgcatatatttccaagaaatttgcaaatttagataatagtaccatatcaatgttaaatttcctgatttgggtaacagctgtggttacgtaggagaatgccctcattcttaggaaatagcaatgaagtatttaggggtaaaggggaatgatgcttccagtctattctcaaatggtttagaaggaatattagtatacatattaatgtatactaaatattagtatgtgcatattaattaatatatgtacagaaagaaagagaacacaaatggggcaaatttacacaattgatgaaggatatgtgggagttcataaactattcctataacttttaagtaagatggaaataatgacaataaaaagttaccaaaaattttaaaattattgacagtttttgatttttttaagtcgaactactgaataaattcaaggatgagtttctcaaaacaagtccctgtcaagtctaatcaagaagataaaagaaaaaaataatctctgctgtggcaggatggtgtcatccttataaaagagtatgataactccataacaatactttttaagtaaattccagactttatttagatgtcacccacttttcaactaacgtcctttctctgaaccagaatcttatccaagatgccccatttcatttagtcaccgtgtctcctcagtctcctctgatctgcgacagtttctcagtcctgctttgtttgtcatggccttggcagtttagacgaatactggcctggtattgtgaagaatgtccctcaatttcacaccttcagtttttaaaatctgaataagatttgcaaatttcttggaaacatatgggttaccaaaactgtcaataaaagaaatatttaaaaatctaaggacaataatactactaataataaacatagaagaactggaaagactgtcaaaggaccgattccaaaaacaagacactagattaaagttttaagggcaatttcttccaaatgtcaaggaatgaacaatccctgtgccatttgtttcagagaaaagagaaagttggagattctcccagtccattgttcaaagcaaacataatcttgtcatccaaacttcccaaagatataacaaaaaataaaacctatgaactaaactcatttgtgaatatagacataaacatcccaaataaaatattacaactcagatccaacaagattaagattttcttgcccatatgcaaaatacctcaacattaaaaacatctattaactataattcatttcatcagaaagtcaaagaaggaaaatcacagtcatcttgattgatgctgaaaggtatgaattcaatatctcctcctgatgaaaactcactaaatttagaagcatctgatctcaaaacaatacaaaatagctacctcgaaccacagacattgtcacacatgacagcaaaaaaccagcatcatttccattcaagtcagcaatgggacaagggtatctattatcaccattgacaatattcagcctgttctaggcaattcaatataacaaagataaaaaacaaaatgtgtgactattggaaagataggatttttttttttttttttttttttttttgctatttctcaatatgcttgttgacctagaaaacccaagagaattaactagaaataaaaattagaaaattcaagaaagcacagtctggtggcaatttacagagtaaagataatagatgataggtagataatagatagaaagatagatacatagatacatagatagataagatgctttcctatttattcacaatggccagtgaaaactaaccataattaataatgcaaaataatatcatccacaaaacaactggaaatctgaatgcacagaatactaaacatgaaaggtcatagattcctattagaaaaaccaaaaattaacagtcttcaaagaagatctgggtgaatggaaagatatatcacattctgataatactatagactttttcaattactttacaaataaattgcgatttcagtcaaaatccttgtaggagaaaaacattcataacatttttaaaaaaacaaaataggtattagaagaggcttaccctaccatatattaaaataaattacagaaccatgctgttaagacaatatggaacccactcagaaaagacagatgtaaaagaacataaataaaaatttatctgagaaaaaataatcaaagaatatactaaaaatatattgagtccatttattattaaagaaatgtaactcaatacaaaataacattttttggctttcaaatgcaccaacagtggaaaagagtataaaatacaattgctgatgaagaagtaggaaactatacacttccatacactatggatatgagggcaaatttctataacctttttggaaagcaacttggaaacatgtaagaaaaactttaaaatgtggcataaactttgatttaggaattttatgtttaaaattagaagcagttttgttttcttgtgatgtccttgtctggctttggtatcagggtaaagttggcctcgttaaaagagtttggaagtattttctcctcttcaatttttttggaagagtttttggagaattggtattagttctttaaatgttgggcagaattcaaccatgaagccatctggtcctgggcttttctttgttggttgacttttttatgactgcttcaatctcctccctcgttattggtctgatcagatttttctatttcttcatgatttcaggtcggtgtgttgtatgtctctaggaatgtatccattgcttctaagttaaccaattttttggcatataattttttttttggagacaggctggagtgcagtgtcacccaggctggagtgcagtggtgcaatcatggctcattgtagcctcaacttcctgggctcaagccttgaactacagatgtgtgccaccatatccagctaatcatttttttaataatttttttttttttgtagaggcagaatctcactgttacccaggctggccttgaactcctgagctcaaatgatcctcccaccacagcctaacgaagtgctgggattacaggcatgaatcaccatacccagccagcatataattattctaaatagcctcttatggtcctttgtatttctgtggtgtcccttgtaatgtctcctcttttatttctgctctctttctcttggttagtcaagctaaagtttggtcaaccttgtttatcttttcaaaaaactaacccttatttttattgcttttgtattgttttctagtctctatctcatttatttcagctctaatattatttcttcagctgctaacattgggcttagtttgtttttccttttctatttccttgaggcataacaataagttgcttatttgcaactcttcttttttgatgtaggcatttattgttatacactttcctcttagaactgctttggctgcatcccataagttttggtatgttgtatttccctttttgtttctttcaagatatttttaaatttctcttttaatttcaccattgacccgatggtcgttcaggggcatgctatttaattcccatgtatttgtgaattttctgaaattcctcttataaccaatttctagttttataacactgtggtcagaaaagatacttgacatgatttcaaccttcttaaatttggtaagatttgtcttgtggcataacgtctgatctatcctggagaatgctctatacgcacttgagaagaatgtggattctgttgctattggatgaaatgctccatatatttctgttagatccacttggtctaaagtgccttagtaattttctgtctggataatttgtccattattgaaagcggtctactgaagtcccctactattatcatattgcaatctatctctcccttcagattctttaatatgtgctttatatatttgggtgctccaccattgatgaatggataaagaaaatgtggcatatatacatgatggaatagtattcaaccttaaaaaaaacattctgtcatttgcaacaacatggatagaatggcagaacattacattaagtgaaataagccgaatatagtaaggcaaatactgtgtgttctcacttatacgtggattctgaaacaattgaactcatagaagcagagagtagaatggtggttaccagaggctggggctgtggggaatggggagatgatagtcacagagtacaaagcctcagctagacaagagaaagagatttggttttttatatcaattgaacatcatggtaaatatagctaataattgagctctgcgcatttcaatataactaaaagagtacatttccaatattcttatcataaaaaatgttaaatatttgagatgatagatatgttaattaacttaatttactctttccaccgtgtattcaaaaatcataacaccactttgtaacccaagaaatacatacaactgtaatctgtcaatatataacaaaaatattttttttaataaaataaaattagaagaaaccatccacttgacctcatggaatactatgcaatcatttaaaattgcatccttgaaagatatactattaagtggagagatgagcagcatacattaagtgaaaatgcatgttagtgattttgcataggagaatcccaggtttataaaggagcaggcatccagagaagatggttagtataaacagagactcagaaggacaggcccatctgtttccctgtaggtgtagtgtctcggtcatcagtcagccatgttgctgttaatcttcccctccttaccttctttttattttattttttttttttttgagatggagtcttgctctgtcacccgggctggagtgcagtggcatgatctcggctcactgccacctccaccaccaaggtttaaatgattcttctgcctcaatctccttagtagctgggaccacaggtgtgcaccaccacacccagctaatttttgtatttttgtagagacgtggttttgccatgttggccaggcttgtctcaaacgcctgacctcaggtgatctgcctgcctcagcctcccaaagtgctgggattacaggtgtgagccaccacacctgacccctccttagctttatcccttgcattagagggtcagcttctggacggaagggttgttattcattcactcactcattcattaattcactatgtgagtcaggcatggaagtaaacaaagaccacccaaatgagaacaagcaaaggctatttatttagagcttgctatgtcaagagagtcagcaaccatcactcacatttggcagagactcacagggaggcagagaggtgggaaaagtttacagtggaaaaagagaaggcttccagtgtgccccgttagtgggggaagctgtaggcagctaactagaagcagggcatcctatgtgatggtttaagtgggcatatttggctttctccatgtgaagctaagttagaagcagggacaaaaattagggacactgtccctaattcaacaagtcccagccatttaagaccaaatgttacaagggttgttatttgtcatcctggatggttgctaaagatgggagtttgacttcttaaattctttgctgccgatcgtaggtcagagttctatcttatatatggtctggttattgcccgtatattttgtctcttgtaagcactgggaaaaacaatgacttagaaaggtacctgaaacccattgcttgccctcagggagattatgatcaaacagaaaagacatcctattattttggaacgtcctggtgacttgttcatgttcaacagtagggcttctacctggcactacgaaagcacattggacttgagctaaaagccacaccccagcaccatggcctgcaagacccctgaggacttggctcttacaagccccttttatgtcatttctcactactcctcccctcacttgcacctctgcaggtcgcgctggtggtcctgccggggaaaaaccaccccttagatgcaaggagtgagggtattcaatgcctacggagcatttttatctccatgtgccagcaattctaagcaatgtgcatgatttaaaaaagaaatactcctttcaaatctattgttggtttaggttctatacaacgactcccattactttgtgttttagtaatatagatgcaagcttcaaattagcacatttttattacttacattttaatacacattgatttctacatggaacttaattcaaataactcctagttatagatgtgttcctgagacacacacactcaactatacgcatttatttaaagagtaaatttatagcagctcagaattgctgaagttcactttgggcacagtccctgtccccaagctgtgtggaactacacatccctgcatttaaacagtaggttcaaaacaaacaatgctagcacagtgattgcaaaggcaaagaaacagaactgagatgacttcaagtctgtcatcccaagtgatcgtgtggaagttcattcatgtttaaaatttaaaacagaaggaactaaacagtgttacctttttgtttgataagcgcaaattttagttcacgcatgatttattgaattttaatagggtcttcaagattgaaatttgttagtttcaatcgttaattgaaaactaaaagagaatcaaaaaagttaaattgtacagcaatggagccatttagtactttttatcctggtgtgatgtgatcaatgaggttaatcagtcacaaaaaatatttgcaaacaaccagaatctcccttgaacaatgtccagtgaagcttcaagctttaaaactgttccttgaagatccatgctcagaaatggtggagaaagtcagggcgcagtggctcacacctgtaatcttggcactttgggaggccaaggcagggggatcacctgaggtcagaagttcaagatcagcctggccaacatggtgaaacctcgtctcactaaaaacacaaaaattagtcaggtgtggtggtgagatcctgtgatcccagctactcaggaggctgaggtaggagaacctcttgaacctgggagatggatgttgcagtgagctaagatcgtgccactgcactccagcctggacgacagagcaagactccatctcaaaaaaaaaagaaagaaagaaatggtgaaggccattaacaatgcagcacacaaatacaaaaaaaaaagaaaatgaaatagaaaaagaatcaaattttgagaaatagtgcaaggagaaacgacaaaagacacgagtctaacattgccagaagaaattgagagagcaaagcttcaaagccttgatcattttcaccaaagactggacacatggcccacagcaatggaactggtcatgtcatgctcatcatcatcccaccgttcttcctgatttttgtaaaagaagaaaaaccttgaaagtttttactgaataaaataggaatctatgatgaatctctggtgatgatattttagtggttttcaactaggggagatattttagatgggatttttatacatctctgccaaaattatcctcacgtttaagactttcataaccatttgtatgtctgttgtttcttgtgaaagaaactctttgaaattaaaactaataaagaagtattcttcaaccaactatgagtgaagacaagctgacaaatctggctgttgtgaacagtgaacatgtatagatgaaaaaggttgtcaaagccactggcaaatttgccgaagtcgaggctcaaagtgagaactatgatgtcattattcactgttgcaacagatatatgggaataagtttgtccacatggacgtaatttaataggattaatctattatgtatttttctttttgctatcgtaatttttcttctggcatgattagatataaaaagttcaataaaaggacttttttgctgtctacatttcttttctggtcattactactattactttcattgctgaattgttcttgaaaattattctggcatatagaggaaagagggtgttggaataatcccctctatgtctcaaatgcaccaggctcactctgcttccagtgcctcttgggacacatcaagctcttgtccaactctaagcctttgaacctgttattctccctgcctggagcaccttccttccagatcgtcaaggaactagactcttcccccactcaatattactctcagagggtgtctcagtctgttttctgctgctttaatagaataccacagactgggtaattaataagtttatttatcgtggttctggaggctgggaagttcaagagcatggcttcagcatctgccaagaacctttgtgctgcatgatcacatggcgggagggcaaagaagcacatgagacagagaaaaatgggggctgagtttcatcctttgatcaggagcccactccacaataactaacaagataacaggattaatcaattcaggatcaatcaattcagaattaagcaattcaggattaatcaattcatgaaggcacagccctcatgacctaatctcctcttaaagggccccacatcttaatattgtcacaattacaattaaattttggcataaggccaggcatggtggctcatacctataatcccagcactttgggaggctgaggcaggaggatgacttcaagctgggagttggagaccagcctgagtaacacagcaaggccctgtctctacaaaaaaaaattaaaataaaaattagaaacattaaccaggctatttttttacagtagctgcagtcccagctactctggaggctgaggcaagaggatcgtttgaccccaggaagttgaggctgcagtgagctatgatcgcaccactgcactccagactggatgacagagcatagatcttgtctcaaaaaatcaataagcaaaataaacagatttcaacatgagtttcagaggggacaaccacagcagagacgttttgcccagccgttttcacaatgtgcctgcttccccagtgcaaatctcaaagtcttgcatgaccctcttttttacttgcctgttcgttgtctgtgtcttgctacaggcatggaaaccccggggagggcggcttgtgccaccctgtttccccatctccccacagcacagcacctggcatgcaagaggcccacaggaaatatctgtggcatcgacccgtgagctcagaggagaagcacctggcctggaggggacaggtgagcggggtcggatctgccaagtgcaggcccctgaggcaagagccagagggaggcggagggagggctttcagggaattgcaagtggacagcatgtctggaggacactgttgtggctttgaaagaacagggaccttgaaatggtcatcgtaacccagggtagactgatgagggattttcggaggctgggcttttatgcccaagaaaataaggaggtgttttaagcaagggagtgacatgatctgatttgccctctggaaatatcactgtggcagggagagagaaaggaatggaggggcaagaatgggaagggaaggggaacatggcgaagggctgtgctctttagagcttccagaaaagaacaggggctgagatgcagactaagacgaccccttgctgctaatttcccctccaccctgcaccccaagagctaagatttctgccagtcctgggggaagtccttcgaggagggggacaggaaaagcaggagaccagactgccacaacaggcagggggcaggcgctggcaggcagcacagatgggtttctggaaggacactggtgctggatacagggggctcctaaccaagctgcctgtggggaacagagactgagaggagctacaggggataggatagaggcagaactcgcatgcttccagtcactctcctcactcacaggggagcccagggtcaggggaggccacagggcggtctctgaggactgacacaaatacagaatttctaggaaagaaccactgaaagatgagtgtccactgattttcctttgtcaaaatccagtttggcaacgaagcggctgcaaagagtgccccagccggaacccccagtatccatgcccagttcccaccctggggcacccaggtacgactggggctggcggatgcacaggaaccccctcctccccctcccacactggtggccaggaccggccttgtccccgactcagctgctgatgtgggaactctcctgggacccggagcaaggggcacgctttgaatctttacatgccacaaggaagaaaatcaatttcaatgcccaaaggagggaattactgcagcagaaggtcaccaaccactacaagttgtagtattgtcttggagacttggacggggggaaaatgcctccaagtgaggtaagagtgctctgaggtctgaagcaaacccttctccccaggaataatatgagatggtcctgggagggggacaagaccacacaaaggaagaaatttctttgtgtatgtacaactggggtgagattctgaattctggttctggccacttaggcaaggcctcaactgtagctgcagagctctgactcatgttaagtcttggaggaatggctgatattttaacagtattgtcacagtagcagccacaccagtggcaatggccactccacttaggcatggcagacacattccacagcccagcctccaggccctagagctccccagttaatgccaggttccctaagcactgatgcaaggatgctagatgttggatatttatttatgttccatctggctcccaagatgaaacataaattaaagcgctggctcacacttgtaatctcagccctttgggaggctgaggcaggaggatggctttaggccaggagttagagagcaacctggccaaaaaaaatgagaactttagatgtcacttattccatctctgctccattacagcaaagatggaaagaccctacccatgcccaggtaccttgtctttccttggggccagtgcagcggagcccagtcaaagcaaaggtcaaatgacaggtccattaggctggacatttacaatcccatttctgggtgtatagactataaggcagctgggacccaccttcttatccaggcaatgcaaagatgagcagagggtcactcaatgtcctgggattcaagagaaaaaagatgttgcaggttcagggaagccgctacttcctggactttctgcattaagtccaaagcccttatggatggtaaaaggcagtgcctcagccttgtttccagatcttcaaagttagagaaacccgtggcgtgaactgtattggccccagccaaagggccatgaaagcaacagtgtttctggaatgaaaacacctccatcttgagaaagtgggggccgaggcaggcaagcagagagcagggtgcgtgggagacattctcagtggctgtcctgttcatgacacctttcaccagaggctttagaggggcaacatctgtgtgccagtgcccctctttacagaggttccagctggtgaccgaaatagccaggagggtgctatggaggggccaggcaggaagtggggaagagcggttccacgcagcaactgcctggaaaccacaccctagtgctgctcacaggctgaggagaattaaaataaaattaaaagctggtgaaatgacaccaaatgcgcaatccataaaaaaaaggaatgataaattgggctccatcaaaattaaaaacttctgctctgcaaaagacactgttaaaagacaagccacaaacgggaagaaagtatttgcagagccatgtttgacaaaggacttgaatccagattccataaagaactcccaaaactcaataataagaaaacaaacaaccctataaaaacaggcgaaactttttaaagacacttaaccaaagaagatagagaaatagcaaataagtacatttaaaaggtgttcaatgtcattagtcattaggaaaatgcaaattaaaaccacgatgagatccactacacagttgttagatgagcttaaaaaatttgttcaagtgacaataccaagtgctgctaaatgtgggaagcctctggaaatctcatacatcattggttcaaaattagtacaaccatttggggcaacagtttggcagttttttacaaattataacccccagcagggcgtggtggtacacccctgtagtcccagctactcaggaggctgagatgggaggattgagccagggaggccgggcggcagtgacctgagattgtgccactgcgctccagcctgggagacagagcgataccttgtctcaaaaaaaaaaaaaaaaaaaagatagccctagagaaatgaaaatgtatgttctcacagaaaccagaatccaaatgtttgtagtgtatttactcataatcacccaaaaagtacaaacaacctaaatgtcattgaactagtgaacaaaaaaacaaactgtaaagcattcatataatggaatactgctcagccataaaaaggaatgagctactgatatacataacaccatgcatgcatctgaaatgtgtcatgccaatgaaagagtcagacacaaaagaatacatactgtatgattccgtttctgtgacattctcagaaaggctaaaactgtaagattagaaggcacttcaaggccaagcatggaggctcatgcttgtaatcccagcactttgggaggctgaggcaggaggattgttttaggccgggagttagagagcagcctgggcaacaaaacaagacttcatctctacaaaaaaaaaaaaaaaaatttaattagttggccgtggtggcatgcagctgtagttctggcttctttggagactgaggcaggagaatcgcttgggcccgagagttcaaggttacagtggttacagtgagccatgatcatgtcactgcactccagcctgggcaacagaacaggaccctggctcaaaagaaaaaggaaaggaaaggaaaggagagagggaggaagggaaggaaggaaggaaggaaagaaggaaggaaggaaggaagggagggagggaggaagggggagggagggagggagtagggaaggaaggagagaaagaaaaagaaagaaagaaagggaaaagaaaaggaggaggaaggaaggaaggaggaagggagggaaggaggaagggagggagagaggggaaagaaagaaagaaaaaaaaaagaaaagaaagaaagaagaaagaaagaaagaaggagagaaagagagaaagagagagagagagagggagagagagagaaagaaagacagaaagaaagacagaagccaggtatggtggcttatgcctgtaatcccagcactttgggaggcctaggcaggtggatcacaaggtcaggagttcgagatcagcctgaccaacatggtgaaaccccatctctactgaaaatacaaaaattagctgagcgtggtggtgcgcacctgtaatcccagctacttgggaggctgggtcaggagaatcgcttgaacctaggaggcagaggttgcagtgagccgagatcgtgacattgcactccagcctgggtgacagagtaagacttcatctcaaaaaaaaaaaaaaagaaaaaaaacgaagtaaggaaggagagagagagagacagaaagaaaggaagaaagaaagaaagaaagaaagaaagaaagaaagaaagaaagaaagaaagaaagaaagagaaaagaaaggaaggaaaggagagcgggggagggagggaaggaaggaagggaggagggagggaaggaaggggggagggaaggaaggaaggaggaaggaatgaagggagaaagaaagcatccgcagttgccagatttttttgtttgtttgtttgtttgttttggtttggtttggttaggtttggtttttgagaccgagtttcactcttgttgcccaggctggagtgcaatggcatgatcttggctcactacaacttccacctcccgagttcaagcgattctcctgcctcagcctcccaagtagctgggattacaggcacctgccacaatgcctggctaattttttgtatttttagtagagacggggtttcaccatgttgggcaggctggtctcgaactcctgacctcagatgatccacccgcctcagcctccaaaagtgctgggattacaggtgtgagccactgcccccagccctgttcagtatcttaattgtggtggtgattgtggggccatttgcttttgtctaagctcatagaacggtataccaaacagacagacttttaccacattgaattttttaagtgaattaatgtattaaaagggcgtttttaaaaactggtggcaagaaacttcttctcaaaatggatgtgccctttttcagcaaacgtgacaagcagaccctgactgttccatttaagagacacaggtcaagcacctgggagaagtctctgctggcagcctaggcgaatctaggctgagacccccaccaagttctgccttccagggacaactccagagcaaagtaggagcagagaaaaatcccagctggagcttggggctttcatggaggaggcagggtttaaattgggtcctgaggagtgggtaggatccagggctgtggacgtgggggaggcgggagtacatgcatgcacacacaaggctgattccgaaatagggagaggccagtgggcagccgtgtaagaggacagaccacacatgctgacgggaaactgcaagggtctggtcggcacagcccccgagaatcctgtggtgactcatttgggagccagatggaacataaataaatatccaacatctagcctacttagatcaacgagtacaagaggcgtagggaaggcctttttaccaaatgctgtgaatagcccatcagaaagaaaaacatcaaggagaggacgcaatgaccccgtcagctgacactgatggtgtgtctaccatgtgctctttgcaaaccctggatatataatgacacatctaatccacccacaagtccataagggactttcattaccctcattctgcaagtgagaaaatagaggcacagagagattgtgttacatgtccaggatcacatggagggtatgtaggattcaaatccaggcattccaactctgagcacaccctctaaactatatgctgagctactgcttgggtccaagtaattatgactgcagagagagcccaaggtatacttttccaattttttttttatttgagacagagttctgctcttgttgcccaggttggagtgcaatcgtgcaatctcggctcactgcaacccccgcctcccaggttcaagcgattctcctgcctcagcctcctaagtagttggaattacaggcacccgccacctcgccctgctaatttttgtacttttagtagagacaggtttttaccacgttggccagcctggtctcaaactcctgacctcaggtgatccgcccgccttggcctcccaaagtgctgggattacaggcttaagccactgagcctggtcatttttttttcttcacccatgtgtcagcattatgccaccggcccaccacagcctcccggtgtttctccagttgcaattcacacctgtgcagccttgttcagcaggcatgtgtgcacacaggtacacaagagcacacatgccccaagggcatcctttgcccccaaggaagccaagggactccactgagttaaatgacacagaagaatcacaacagactggatcttaaaagtaataagccttttccaaaagaggccaggctttacaagcagcagtgggagccaaatgacgtctaagcagaacagccaataaattaatttcatgtggaaaaaaaacaggttggcccagggataataaagatcccgtcaacatgaagatctcattacgacacagacttccctggcaagggtcgagtctgctgaagctgttttggattcaagcttcaccagggtcccctgtgcctaacaaagattccacaccaaatgcagaaaagatggacctgtctagacatcccctcacataaaccccacagcatcctcgtcagctacacagaagtggaaccgtgtaaagtttcccttaccatggctgccagcagccaggacaactggggggaaaaggcaaacacagctgttgactcaggaatagcattcaggctttaggtaggaattgttattgaacttctagaagattctgaggacttggtggaaatgaaaggggaaattttttttgtagagccagcaatccccttggagaagtagaggcacatcagtgactcatggatgaaattgcagactattccaaatcacaatttgcagtcattcagccagagctgagctcgagtctctctttggcatggctggaaaacaaaagggctcagtcagatcatggttaacgtaaagacagaaaggggatggagatcaaactaatctcattcataaaaataatatccattcagtgttcatgaacatctactcagcacctccggggaggcacttgctaggagctggtgcacagtagtgggtgtagtaggtgtgtgacctcatgaagcttccactgcagaacccagacattgcacacaaggaaacagcgctgactccagactgtggctgcacgctgcccacttccactgtgctcctgcactgctctcgtgggctgacggccacaggcttcagctgcctgtggatcacagcccaaggccttttcacttgctgctctctgcctccctcagaaaggctgcttgttctcatatgtgcgttctcggctcctctgcagggacccaccccaaccaactgtgaattcccaccctccctttcctcccccacccgctgacactatttaccccatgtattttcttcatataacatagtaaggtctcgtgcacttatttttcctatctgtctcttgagctagattgtcagcagctggtgggcaggaactttatctgtcttgcaaaccaatatctgcctggtgaacacagggtgcccggcacatggtcggcatccagaagattttttttaaactatgaatgaaaaacaaaggtcattatgagatatcccatgaggtatggggctaataagcttatgaggtatcccatgagataggggctaaataggttatgagatagctcatgagataggaaccaataaggttatgagctaacccatgaggtaggggccaagaaagtcgggagacagcccatgagatagggtctaataaggttatgagatagcccatgagataggggctaaataggttctgagacagcccataaggtagagaccaataaggttaagagacagcccatggggtagggactaataaggatatgagatagcccatgagatagggtctaaatagattataagatatcccatgagataggaaccaataaggttataagctaacccatgaggtaggggccaagaaagttgtgagacagcccatgagacagggtctaataaggttatgagatagcccatgagataagggctaaataggttatgagataccccatgaggtaggaaccaataaggttatgagatagcccatgagataggggctaaataggttatgagatagcccatgaggtaggggccaagacaattgtgagatagcccaagagacagagtctaataaggttatgagatagcccatgagataggggctaaataggttataagataacccatgaggtagggaccaataaggttatgagctagcccatggggtaggggctaataaagttataagacagcccatgagataggggctaaatagattatgagatacctcatgaggtaggggccaataaggttatgagaaagcccagtaggtagggcccaataaggttatagataggggctaatagagttacgagatagcccatgagttaggggctaataaggttatgagatagcccatgagagagggaggcctgatctaaatgtgtggctggggaggccctccctgagtggtgacatttatgccaagatgagaaggagaatggggctcaccaggtgcatgttgaataagctctctaggcaaaggagaaagcacattcaaagcttccaaggctggaaaagccttgtgctgtgggaatttacggaaagacatcagggctaaaataggatatgtggccagagaggacagcagggacatgtgaaggggtcctaagcctattacagatgtagcaggaagtccctgaggacttgaagcagatgcaggtcatcgtccagtttatatttgtaaggatcttctgggccagacacagtggctctcatctataaccccagcactctgggaggccgaggtgggcagaatgcttgaggccaggagttcaataccagactgggctacataatgagaccccatctctccaaaaaagtatataaaaattagctagagatggtggtatacacctgtggtccaagctactcagaaggctgaggtgagaggatggcttgagcccaggagactgaggctacagtgagctgtgatcacaccactgcatttcagcctgggagacagagtgagaacatttctcaaaaaaaaaaaaaaatcattctggctatttggtagagaacagattataaggggacaagagtagaggcaagaagacaaaaattagaaactgcagcattatgcaagtgagaaataattggggcggggtgttagcgagatgaagggtgaaaatggagggaagtgcatgcatgagggtgtctcctaaagttggccttgcaggctagatgagctaacaagggttaggaactacaaccaaaggccaggctcatgcctgtaatccccacactttgggaggctgaagccagtggatcacttgaggtcaggagttcaagaccagcctggccaacatggtgaaatcccgactctacagaaaatacaaactataactgggcatggtggtgcgtgccagtagtcccagctacttggggggctgaagcaggaaaattgcttgaacccgggaggcagaggttgcagtgagccaagatcatgccactgcactccagcctgggcaacagagagagacgccatctcaaaaaaaaaaaaaaaaaaaaaaaacaaaaacaaaaaaaaaaaaaacaggacagcaacgggggattgtttcaatgatataatttacaaatcatatatctatctgataagggtcttgtatccagaatatagaaataactcttacaactcaacaataaaaagacaaaaaacccaattttaaaatgagcaaaggatgcaaatagacatttctccaagaagttatacaaatggccaacaagcaaataaaaaacgtccaatgactggtcatgagggaaatgcaaagcaaaatcataatgatgcccatgggatggcaatcagcaaaaaatgtaaacagaaaataacacgtgtcagtggggatgtggagaggaaccctcattcattgctggtgggcaggtaaaatggcacagccacagtggcaaaagttaaacatagaattactttgtgactccgcaaattcagtcctaggtatatgtcccaaagaactgaaaacaggtactcagacaaatacatgtacacccctgataccacagcactttcacaataactgagagatggatgtaccccagggctctatcaatattagattaacggataggtacactgtgttatatattacctataatacataggtaatatatgtatcataagtaatatattatacatataatacatatattatatatacacctatgtatatattatatacatatataatattacatgcataaacatattgtgtaaaatatacatattatatattacatacatatatgtatatttatacatatatatgtatacattatgtttgtgtacacatatatgtatatattatatgtgtatattatatattatacataatatatgtattattgatatataacattatataacatgttatatataatattttttatttgtataaaatataatatgtagggtctaataagtttatgagatgttatatatgttatatataacatacataacatgttatatgttatatataatgttacatgttatatataatgttatatatctataacacatatatacatatataacattatatataaaatgtcatatgttatatatatctgtaatacacatataacataaaatatacaaatagtatatctgcattatatattatatacatatatacatatatgatattatatgtcatatttatttcatttttatatttttattatactctatttgtatattgtaaatatatattatacttatatttatttttattgttatattatttattgtatttatatattatatacatatgtatattatatatgtatataaaatatatataacacaatttacttttccatatatgtatgttataatatagtggtccccagctttttcagcaccagggacctgtttcatggaagacagcttttccatggacactgaaggtggaggcggatggtttggggatgaaactgtgccaaccctgatcatcagacactagttagatgctgataaagaacatgagacctagatccctcgcgggctcagttcacaatagcgttagcgctcctatgataatctaatgctgctgctgatctaacaggaggctgagctcaggcggtagtgcttgctcacccaccgcttacttcctgttgtggggccggttcttaacaggccatggtgctggtccatggccccggggcttggggactccaatataattgtgttatatttttcagccataaaaaaatgaagtactgatacatggtacagcttcaataacattatgttcaatgaaagaagtcagacataaaggtcacatattgtcattccgttcatatgagatatctggaataggtaaatccacagagacagaactcagattggcagttgccaggggcttgctggagggggaaatggggagtggctgcttaatgaacgtgggcttttattttggtgtgtgggaatgttttggagctacatggaggtgatggtcgtacaactctgtaaatgtactacatgacaccgaattgttcattttaaaatggttcattttatgctatgtgaaatatacctcaatcaattcatttaaaaaaaaaaaagaataacagccaggtttggggattgaacaatagggtagaaacaagtgccatccttggaggtggggaaggctgagggaaggtatgtttgggggaagctgaagagtttcagtgttggacatgtgacattgggatgcccttaggtatgaaaggagttcccagggaagtagttggatttggaatctcagagctcagataggagatcttagctgtagataagatatttacaactgcttatatataaaagcattttcgaagcaaggagaggaatgagaacaagcgagacagtagtgtaaaagaaaatccaatattaagttccagagaaagtcacatgaagaccaaccagcaagtgaggctctaaaagacagaggtgtagaggaaccttgtgggaagacagtggtgcaggtatcatggcagtgaggaggagagagtgctttaaagaagagaggtcagctgtgtgtgctgatgcagagagacagagactagaagataacagctccaagtgtccatatgtgacaacatggaggtcccaggggctgagaatggcaacaaggaacagaagccagcctctaccagctaacaaaagagagtgggacatgggttcatatctttgcagggaaatggacaaagctggaagccatcatcctcagcaaactaacgcaggaacaaaaacccagacattgcatgttcttactcataagtgggaactgaacaatgagaacacgtggacacagagaggggaacatcacacactggggactgttggggggtggggggcaagaggacggaaagcattaggacaaatacctaatgcatgcggggcttaaaacctagatgacgggttgacaggtgcagcaaaccactatggtacatgtatacctatgtaacaaacttgcatgttctgcgcatttatcccagaacttaaagtaaaatttaaaaaaaagaaaaagttttctttaaaagagggcgggaagtaaaagtatgaagaaagcacggcagacaattctcttgtaagctttggtaagcttccactcctttttagggaatttaaaaaataagaaaatgattgggggaagacgtgaggtcaaaaatgtcccagttaaaagatgggagatattaaacttatttagaaactaggccgggtgtggtggctcacgcctgtaatcccagcaatttgggaggccgaggtgggaggatcacctgaggtcaagagttcgagaccaacctggccagcatggtaaaaaccctgtctctaataaaaacacaaaattagccgggagtggtggcatgcacctgtaactccagttacttgggagactgagacaggagaatcacttgaaccagggaggcggaggttgcagtgagccaagatcgcgccattgcactccaacctgggcaaaaagagtgaaactccatctcaaaaaaaaaaaaaagggaaagaaaaagaaagaaagaaactaatctggaccatggagctgggaaatgcaggagaggggagctaagtgaatgtgaacagagtccttgagacgttttgaggggagggagccagggaactacagggaggggaagaaaagagacaggaagggttacccgagcagggagctttctagaggactggagggaggaaggtgaaggcatttgtgacctgtggctttcatctcttcaatgaaggacaaaacaaggtcacccgcttgtgtaggccagtgtagcccaggtggtttgaggagggcggacaagacatgagccggaaatgaagagagccggcaagcgtgatggcgacagaaacagctgcattctattggcgactttcttttgatatgtcctctatcataggtgatctccaccataaccccagaaagtggaaggagaaaggaggcagctctggggggtggggaggacagaagaccacacccttcacttccttcaagtctttgttcaaatgccactttttcaatgaagttcatgttgaccactcaattttaatttgcacaccatcacactgcactctagctcctagtccctcccaccctgcctcttttaaatagcacttacaccttccaatatgctgtgtaatttatcatttagcttgctgatgtatcccaagtgcttgaacatggtaggtactcaataaatagctgctgaagaatgaataaatggacaaatgaatgaagtagcttctttaagttctctgagagcttctatctttgttacttttatctggtgggtgtcagtctaatcatgaaggaggtcccaaaactctttctgaccacacagccctatcagtgtaaaatttggccatgtccccccaaaatttggccatgggtatttattcatacacaaataatttggtcatattttatttggttaattacatatgttgttactgtataataatacatcacgtgtatttttacctgaaagttttttaattgaacataaagtaaaaataactaatagattgtttttctttgtataccaaagtggagcagcttcttgtagacataagacactaccctaaataataactgagtatgtatgatgtgataagcacattcacatatgacagcacaatagccgccccccacccctccaccacccatatctttactaggtctatttgtattcccacttagtggctgagaaaaccgaggcttacataaatgaaataacttggtctgtgtcccagttagtaagtggcagagccagaattaaaaacttaggggtgtctgaccccaaaactcatgtgcttcagatgtgggacagagactccacccttgagtcaattatagttaaagggagaaaaagtgagaataaactcaccatctcacccttgtggacacaccctgcaatgcgtccccaagctccgcattctggaacaagccatttgtccagtccagagactacattaataccctgcagaaccaggggcgcttacatgggtcctccgtgcccatggaggcaccagaacctaaaaatgttcaagaaatggacagcagaagatatcaaaataacaatgaattgtgccaaactcatctatttccaaggtgaccttatgtcccagtttgacagggacagcccccatttaattatcaatacacaccctttcactctcaaaattatcactcccaaaaatgtcccagtttggatgataaattatatggccaccccatctacaccctggctcagcgcacaccagtctgagcccaagggccgctctgattagaactgaaaatgcagtgatttctcatatccagggacacttctcaccattgcccccagaggtcaaagcagcaggttccccattagcagtggctgaccccaagcaacctgcatggaattcacacccggagccctggaccatctgggccacccagactccttttccataaatcaccccacgtcggccacccagcctggccgccagcttcactcgggtctcacctcaatagagaaacatcatcactgacattaacggaaggtttgccaggggctccactgctcaggtgatcaggggcttgtgttcatcagactcgcttgacaaagaactgggcagccagacacctgctttggagtcctatggctgccaccacaccttggagaggataaggaaaacagggcatccaggcagccagaattgggaccactcaggacagaaccccaaggcacgtggagctgccctggcaattgtcaggggtctccagcgtccctcctgatgctcctccccagcccatgtggtcctcacaggccagccctcccctccccttgcctgagcaacaaagcccaggcaacaagagatatctcctggaagatagcttgaccatcttgctcctgggtaaggaataggtgctagaatttcacccaggtgggccagacagaccacctggtccacagcaagccactccagcccacactggccacagctgaaaatcactcactatcagaaacatcccctgagtcgcttgtgtaaattaccagccctaagaaactcaaggtcaatgtcccagggcttcttattttctctgcctcctggctgtggtctctttccctgagaaaatctggggagttgcagggcacctaaagggatttttgtcgctttctcagtttgattttgttggggggaagcccagaggcccgtgtgatatgccaccaatctaccaaaagttgacatccaccttgaagcacaagacccaaggggaaaaaaaaaaaaactgatccaagatcaaacgttgtagggcatggtaatttttgaagttctaagaaacatttacattattgtattttttaaaccctggtctttgttctttgggttgctagtttcctccccgccgacccccattcccacctggcagactggaaggcaagggacccagggggtaccttgactctgccactaattggtcatgaggctgcgggcaaggctgctcccttccttggcctcagtttctccaggcacactcagcctaggggtctggatcactctgtgagcctggcagggcctgcccagtgaagagcgggtctggcttccagcaggggtctgcctcctagtcccagctggatttgactcggtgcccctgggagggtgaggatggaggcatcttctccaggctccttagcagcacagaaaaggcatgcaaacctttccgctgtggtcagagacagcgagctcactgctggacagaccccagggactccagaatcaagacttcgtagaattgggcttgatggtcttaaagggaaatgtcaggcccagatgggatgctgagtttatctgctggggtcccggcctcctgctcactggttccttcctgtgcctccgagagaagatctccaatggcagctgctgtgtctccactgggcagcatcagagtaaacagcaggttctgggtcaggcacatcctccaggaaaaccactggcttccccactggccttgatggagggaccctgtgcccacagcactcccgcccagaccaggcatctgaaagacagggaacctgcactgaacctgtcctaggaggcagctcccaggtagggagagtttgcccacaggcagagtgaggacatggcagccagggagcctcaggacactggctttggacaccctagactgtggcatccttgagagctggaatcagctcactctgcagccatccctccaacccccaagtcccaacacagagctatgggaattcccctcactgatttttgttttccaaatgctgtggctaccatgtgggtccaaagggagccccatatctgtggtcggaattgtcaaaagctagtgatggcgtggctggattttctcccagactagggtgagaaataaaaagaagggaaatgggaaggttagccattggttcttccaagagaggacttgaggcttgcgattcaccattttaaataaaataaatccattttatttctcagaagcagccccttcatcctcagcagttcagtccaaggactagatggtgtgcaggggtggagggtaagggcagcagacaccagatttggggttcccaggagcgactggccagcagccactgcccagtcctggctgacactgactgcagcgccagccacgctgggcacctcactcccctgaagcgtgccctggcacaagcctccacaaagcactgagttgtaagagactccagcaggcatgtaccccaagagatgatgagaattcgactcagagagactaagacacctaaaaagactcaaccccacattcattaccagacaccttctgcaagcattcatcatttcttctctccagaagtttatggacatggaagcaatacattgaaaccatttcttaatgtcaaacaataatagcaggtactgatctatccaataagatggaaagattatttccattcagttaattagaaaactttacaactaacattcactggatgctaactatcagtcaggcatgttctaagtacttttcatgatcattgcagataaaactcataacacccataggtagtaaatttcactatcaagttcgttttgcgaatgaacttgaggttgaggatcgggcccagagaggttaagaaactcgctcaagatcacacagttcataagtggtagaaatttgaacccaagatgtcagattcagcctctacttaacgatgctttacacaaagaccagagattgaaaattgtgtccaagccacatagctgctatgctgagaggtgcagactgagctgcaggctctcaggctttcagcctgatggatgagtacagtattcacagtgcattctggacacaggagcccttgggaggtggtacatcgtgaggatcctgctgtgctgcagcctcaaaggcaggatgcgtgcctgccagtctcagtccctgcaacattctccaccgttagatgattctgaggctttgtagagtccagagtgaggagcccccaggactgacactggtgaccaccacctgagaaaatggagcccatccacactgccttccttcctcgcaggccagaccaacctcttgtgcaaaaccggtcttgtgtctttccctccctctctcctctctctctccctcccaatccctcaacccagaacacaggctgcatctacactcatccctcacaccttcacggggaccacaagacatgaatcacttctctctgtcaaggttatattttcttgttttaaaaagagcacctattcttcttattattctgaggattaaaaaaaaagtggcatctttttttggctgagaaggtggctgaatttttcaatatattcatgcaaacgagatatttcatctcatggattttatcccagttctgtctatgcacattttaaataaattaagatgaaataaatccattttattatattacccagtgccatctccatgaaataatgcccatatttgtatttcctaaggaatgttgacgtggctaaaaatgtttcagcaagtgtaatctttgaggattgtactgccagaaaaaaaataaacctaggcctttgtttagagcccggagtggcaccacttttgattgaaatggcttgaaatatccaaccccaaaacatggacaaggcagtaaagtacacagaattgatcacccttggctcagaaacaaaagtgctatgccttcctttgttttcttaacatctgttctctccctcccagcataaaccaccccacagaaataaattacacagcctcccttttttgggagaagagaaacggggatttgcagtggccagacctgaggtgcccagggcagactagccaaactctccttgctccctgggtggccgctgcagagactccagactatgtgctcctagcaggtgctactgctgaccttgaaaaccccagcatctccactttccacttccctcaagagatggaagaaacaacatgaaccctgggagaagaagctctgtggcatcttgttttcctttaaaaggcaggtggaccagtgctggtgacacctgcaaagttaacactgcagcccaccagccatcaaaatcaagaagagctaaggaaagtagaaccaaggtgtggcttaaatcactcatttgcccctttcatgcaggagataaactaggctcacaaagaatggatggaagtgaatgataggccaatctgtcaacaagagccaaatcctggggctgtggtttttgtagaaccccaggtataagttgggggtaaaatatatatgtatatatcatgttgtgggagggcaactactggcttcaatctaaagccctggacccctctctcctgctcacacatcctccacatccccttccctaccattccctggcacttctcactctccaccttgagttacacttaacatatgttggctggatggacagacagacggactactcaattacacccagcccagccctttctaaacaaccacccagctgttgcaaacagtggcaataactgctgggtctgtgtacaaacagcaggggaccacctgggatgcatgagccctcaaggccaaagccagcatctccacaagcctgagcatcacagctaaggaacctggctctttttgtggctgtgcttggagatatgattcacatactttctggccaaaaatgagatgcctcatcatctgagatgctgcgaggttccccagcaagaactcaacacaaatgtacaacagcctcccggtagaatagcctatttcccatctccaggacgggcaagggctttcacttgccagagagtcaccagcagcttggaaagacacttccgaccgtacagaaaggggttccctttgaatggcagagattgtatcaggtgctaataggacgaagtgacccccagaccccctcctgtgtgcatccttaaatgtcctaatgaggcggcagccctccttccattaaatgtaaggagatccagacttcctttcccaggccttcatcagggccagttatggaacactcatgaggcctcgtagcaaaatccccaaccttctgcagctcgcacagccaagtgctattctaggctggctcctcctccctccaccgctattagtgtcaattaggttcggcatgacaggccacctttgacaaaatgctggagcaacaaagacataaacaacgccaaagcctttggagttgatgtatggttgcatttaataaacatttgtttgcatattttttatcatgctaatgaatataattactttaatttatgtcatcaagctatgattctgttctgatctatacgtcacttaaatgtgtagcgttagcattttgcacacactggcaatttaagaagggaaaagattcgcccctcctgtgagaacttggagcaacattccagagttgcgcacgcccttgaaaaagctaaaccgagctctgcagctgggacccccatcctcgcacccctgcaaggataggtacgccttccacggcctgacagaccttttccaaagagcacacatttttatttctctgtaatctccccaaaagaggccactgaatacttgcccacagcataatgctaaacacagccatgaaaaaaaaagagttaaaatcgtattaatgggttttactgattataaaagtaaagcaagtttattttagagaatttgagaaaacacagatcacaggaagagactaggtgaagatgataagctaaacttctactctcaaaatcctttgaaatcaaatatatatatttatattaatatattttatatagataagaggatatataatatatatttacgtaaatatatatttcagctatatataaatatacatttaggagaatatatattatatatgtaaaatatatatttagaagaatatatatgcatattagtctaaactgcactagaatacaggaagggttattcttggtagaacagactcatgataagcaaaacatacattcagaaaagaagcacaagaaatgttacaaggtgcaccaagaatgtgccaagcttggatggggcacccccggagcacctgcagtgcactggttgagcaactattgcaggagaactgaggtgggttacccctaaccattgcctttccatggccagcatgttaagcagcgttatggacaggcactggcctgtggtagagacattgtttatgagtacctgctccatagagacagggcagtgcccagatgatctgagccttcactcagaatgggccagctccctgacccctaatacatgagggcaagctatagaaaaagattaaaaattaactgagttggctaagactcctgtctcccacccagagtcactgtgcaacgcccatgccccagaggcactagcaaggggagtcatgtcacagcatgttgctctacaccaataagacatctccttccccataaggccttaatttctcccttccactcagacataccatgaagccacaaggccactggcaaggagatcctgacataacaaccatatggtccaggaagctctctccatcccccactggcaagggggggaacccatcacacaagcagacagcctgggaagtgcgctctgtctatcagagacccttccccagtaaggtttaccagatggctcagcctggggaagcttcttcttcccattcaagcaccagcagggaccagcgaaagcctcagtcacaggagataaaccaagcagaccaaaataacaccacataggctctgaaaattagactgtcattggaaccatagcctttaaaagtaggccagggcctgcatgccaaatctaaacagggtgactgcctgctaaaatgaaagatttaaataggaaccagagtctcctaaaataacatccaaaatgttaaggatacaatcgaaagtcacccatcgtaccaagaaccagcaaaaacacaagttgagtgaaaaaagacaattcatagatgccaacactgagatgagtcagatgttaaaattaactgacaagggttttaaaagtaagtatcataaaagtggttcaacaagcaattacatgttatcttgcaacaaatgaaatattttaaaaatcagtaaaattcagtaaggaaacataacttattaaaaataactaaattatagaattgaaaaattccgtaatagaaatagaaaactgctagataggcttaatactgaatggaggcaacagaaaataaaattggtgaacctgagaatagaccatgaaattcatccattctgaaaaatgtagaacatagactgaaaaaaacaaacagacctgtggataataacaaaaggtgcaacattggcattattgtagtcctagagaatgagaaaaagagtgaggctgaaagagcattcaaagaaataggctgaaaacttcccagattagtcaaaagatataaacccacagattcaaaaaggtagcaaacaccaaataatataaaatcaaaaaagtcatgccaagacacatcataattaaaactgaaaactgaagacaaacaagagtcttgagagcagctagagaaacctacacattaccaaagaaaacaccaaattgaatgacagaagatttcacacctgaaaccatggagtccagaaggaagtagcagtacatttctcaagtgctgaaagaaaaaaaactgtgaactggaaattctatacccaacaaaactatcctttgggaatgaaggagaggtaaattctcagatgaagaaaaactgaaagaacttatcactagcagacctattcataaagtacagctgaacaaagttcttcaactagaaaggaaacaataataaaagagatctcagatattcaggaaggaagaaagaactatggaaagactagaaatgtgaataaacacaatagactctccttctcctaatgagtcttctaaatcacatgtgatgattgaaacaaaaactattgacaccatctgccatacaagatgatatttaaaagtggaaatattttttaattattttaatttttaatttttttatttcaataggtttttgggggaacaggtggtgtttgattacatgaataagttcttcagtggtgatttctgagactttggtgcacccatcagccaagcagagtacactatacccgaggtgtagtccgtcaccatcctcaccctttcccctgagtctccaaagtccaatgtattattcttatacctttgcatcctcatagcttagcccccacatatgagtgagaacatataatgtttagttttccattcctgacttagttcgcttagaataatagtctccagttccatccaggttgctgcaaatgccatcattttgttcctttttatggctgagtagtattaaatggcatatacataccatagtttctttaaccactcattgattgatgggcatttgggctggttccctatttttgcaattgcaaattgtgctgctataaacgtgtgtgcaagtatcttgtttgtataatgacttcctttcttctgggtagatacctagtagtgggattgctagatcaaatggtagatcaacttttagttctttaatgaatctccatactgttttccatagtggttgcactagtttacattccaaccaacagtgcaaaagtgttctcttttcaccacatccatgccaacatttaatattttatttttttgattatggccattcttgcaggagtgaggtggtatagcattgtggtttcaattagcatttaaaagtggaaatatttttttaaagggaggacctaaatgtaattaaagtttccacactttactcaaagttgcaaaatgttattagttgccattttgatattgtgatatctgcagcaacaactaagaaaactacacaaaattatataccccaaaacactacaaataattcagcataaaattcttaaaaatattcaagtaacctatagaaaggcaagaatggagaaatagaggaaatagaaaacaaaataaaataaaatgtcaggctcaagaccaaacatatcaatagttaccttaaaggtaagtagcctaaatatactaattaaatgagattagaagagtaaatttaaaaatcacaacccacctagaagctgtttataagtaattcacttcaaattcaacaacataagtatgttgaaaataaaataggaaaagttatatatcataaagacattaatttctaagacgaaaaaatgcttatattaatagccaaaagagtgaacttcagaccaagaaaaattactgtagacagaaagacattacacaattgacaaaagtgccaatccaccaggaagacaaaacaatcatagatgggtacacaccaaataacaaaggttcaaacatatgaaacaaaaaatgacagagctagctgggcatagtggctcacacctgtaatcctagcactttgggaggccaaggcaggtggatcccctgaggtcaggagttcaagaccagcttggccaacatggtgaaactccatctctactaaaaatgcaaaaattagctgggcatggtggcatgctcctgtagtctcagctactcaggaggctgaggcaggagaatctcttgaacccaggaggcagaggttgcagtgagctaagatcatgccactacactccagcctgggtgacagagagagaccccatctcaagaaaaaaaaaaatagagcttaaaagagaaatagataaatccataattataattggggacttgagaccctcagcatctgacagaactactgaacagaaaatcagcaaggatagaaatgatttgcaaaatacaaccaaccaccaggatctcattggcatatatttaatactccaccaaaacaacagaagaatatacatttttttccaagggcctatagaaaattcaccaaaataaaccaaattgtgagccataaaataaaccccaacaaatataaaagaatttaaattatccaaagtatgccttctgactacagcaaaatcaaactagaaatcagaaaaggaagagaaaaggaagatgaaagaaagacaacaagaaaatgtctaagcacttggaaattaaataacatacttccaagtaattcatcggtcaatgaggaagcctcaaaggacacggaaattttaaaagatagaactgaatacaaacaaaaatacaacatataaaaataaatgggatgcagctaaagcagtccttagggaaaatttatagcactagattcacacattaaaacagaggaaatgtctcaaatcaataatctgagcaaaataaacccccaaaaagcagaggaaggaaataataaatatcagagcagacatcaatgaaaatgaaaatgggaaaacatacttaatgacaaaagactgagtactttccctctaggggcagaattaaggcaaggttgttgcctgtaccacctttactgagcacagtaaacgggagttctagccactgaacaagtaaatgagaagaaacaaaagacatatatattggaaaggaacaaataaagccatccctaataataatttaaattcttttatgtttgttggggtttgctttatgacctatgatttggtttattttggtgaattttccataggcccttgaaaaaaatttgtattctgctgttgtttgggtgaagtattatatacatgccaatgagatcctgacagttgattgtgtttttcagagaaaaatcaaagaaacaaaaagctatttctttgaaaaaattaataaattttagcaagagtgtcaaatataaaatgagaaaaacacaacttatgagtatcagggataaagaaggaatattcctatagatcttggaaacatcaaaaaataatatgagaatactacaaacatttccttcaacagctgaggaaaaaaagtgggccaatttctcaaaaaacgcaaactagcaaaattcagttaaatcaaatatataatgtgactagatctaaccattacagaattgaattcatactttaaaatctgccctccttaaaaaaaaagaaagaaagaaagaaatctccaggcccagatggctttactggagaatcctatcaaacatttaaaaattaacatcaataacaccaattttacacaaactactccagaaaacagaagaagagagaacatttctcaacttattttatgagtcctgtattactctgatatcaaaatcatataaaaaaattttaaagaaaattgcagactattagctgtcatgaacttagatgcaaaaactctcaacaaaatattagcaaatcaaatctgacaatctattaaaataattatatgccataaccaaatgggatttatcccaggtatgcaaggctggttcaatattcaaaaatcagtcaatgtaatacatcatatcaacactctaagaagtttaatcatatgatcagatcaattgacaactcaaaagcatttgacaaaacctaatacccactcaggataaaaattctcagaaagttaggaatggaagggaactacatccacttgataaagagcatctacaaaaccactacagccaacattatacttaatgacaaaagactgaatactttccctctagggccaggatcaaagcaaggttgttgcctgtaccacttttattgagcacagtcagcagttctagccactgtaatgagtaaatgagaagaaataaaagacatacatattgaaaaagaagaaataaaaccatccctacttgaaaatgacataattatctacatagaaaataccaagggacttacaaaaacattcctagaatgaataagtaaggttagcaaggccacaggatgaaaaagcaacacaaaaatcaactgcatttttatatattaacaatgaggctgggcgtggtggctcagacctgtaatcccagcactgtgggaggccgaggcgggcctcttgaggtcaggactttgagacaggcctggccaacatggcgaaatcccgtctctacaaaatacaaaataattagccgagtgtggtggtgggtgcctgtaatcccagctgctcaggaggctggggcaggagaattgcttgaacccagggggcggaggttgcagtgagctgagattgcactgcactccagcctgggtgacagagcaagactctgccaaaaaaaaaagcaaacgaacaaaaacaatcaatatgtagaaatccaaattaaggccacaataacatttataatcactccagggaaaatgatacaatgaaaaactatagttttacaagatgttactattgtataaagggcacatgggaacactgttgtttcctacaactgcacatgaatctacaattatctcaaaataaagtttttaaaaggcacagccctttggaaaacattttgacacattattataaagttaaagcatatacttaccatttgaccaagcaattccacttctaggtatttacccaagagaaatgaagacgtatgtccacatttaaaaatctacatgcaattatttgtaatcaccaaaactggaaacaactcaaacgtctatcaactggtgaatagattaacaaactgtatacattcatacaatagaattctacttaacagtaaaaaaattattgattattgatacatgtaacaacacagatggattgtgtgattttcaaaaaccgcagaaaaaaggcctttaggttgaaaggattcgtaaatattaagcagaaagacagaacaaaattgaaatgagagttacctcctctgcaaaagtcagagtgccaagaaaaagatagaaccctaaaaacttccagaaaaaaaatgttacctgcaaaagaaaaaggatcatgttgtcacctgacttttttgagcaaggatcatattggcacctgacttttttgaacatatcataacatttttgagatagaattatattaaatttacatttctgtaccaagccaaaacatcagtcaagctttagggtaaaacaaactaaaataataattcaagagtattaggagataataaaccatagtgcacaaagaaatcagtaaaatttatagttgggtctaattcattaattgactgaaagaaagttaaacaaactgggaataaaatctctactgataatgataccagaggtgtgggatacaggttgagaaggagtaggaagtaaatagtagggagaagatattaattttagacattaaaagaaaatattattaagattttcagagtaaatacaaacaatttttttgagatggggtcttgctgtgtcacccacgctggagtgcagtggcacaattatagcacactgcagccctgaactcctgggttcaagcaacctcctgcctcagcctcctgggtagctgggattgcaagtgcaagccaccatgcctacctaaatttttagaaattttctgtagggataaggtctcactatgttgcccaggctagtctcaaactcctggcctcaagctgtcttcccatctcagcctcccaaagtgctgagattacaggcttgagccaatgcatccagcacaaacaaactttaaaaaggtgttttaactgccaaaccactggaagaaaaacatggatgtgaatatatagaaaaagctctagaaggacacacactaaactgacaacatgaattcctataaagagtatgggggaggggatatggggttggtctgagggacttcagccgtatctgtagcattttagcatctacaagaatgtattcattcttgtacagattgtgcagatttgaacaatccttactttaattgtcaaagacagaaaaaatatctggaaggccaaggtgggtggatcacttgaggtcaggagttcaagacctgcctgaccaatatggtgaaaccctgtctgtactaaaaatgcaaaaacaattagccgggcgtggtggtgggtgcctgtaatctcagctacttgggaggtcgaggcaggagaattgctagaacctgggaggcagaggtttcagtgagccaagatcacaccattgcactccagtctgggcaacaagagtgaaactccgtctaatatatacatatatattatatatgtatattttatatatataatcaatactagaggaaatttgaggaagaagacaattttactcagtataaagtgggatatagtttgtgaaagttttgcaataagtattaaatgtgggccaggtaccaacatttaatacttatttagtagtacaacataatacttatttagtagtacaacacactaaatattcattgtaatatttaactaaataaaatcaagtactgagagaatgataaatgtcatcagtgcccaaaaaatgatcagctttacaatagtagtgcatttttatctagttttatttacaaatatatctagacatagagatgtaaaacagaaagatacaaagagacttggggctagctttattcacaaaatagggatttcttgtgcttttttcttactaatttgaaactatatttattagagttttgtagtctgtttgttctcgcacacactcataacctatttgcataccagtaaatagtcttcaaaagtatcattcttaatggctgaataatatctcatactttatatgcaccgtaataatttattatatggagatttaagtaatttccaatttttgtctaatttaaataaaatcacagtgaacatcattatacatacatatgtgtggacatctgtgattctttaagtaatttcttaaaattgaactgctggtccaaaaaatgtactcatttttaagactttgttttgagacaggatctcactctctcacccaggctggagtgcagtgatgtgatcatagctgactgcagcctcaacctcccaagttcaagcaatcctcccacctcaccctcccaagtagctgagactatagcttgcgccatcacactctgctaatttttgtatttttttgtagagagagggtttccacatgttgcccaggctggtctgaaacttctgggctgaagcgatccatccaccttggcctctgcaagtgctgggattacatgtgtgagctaccacagtgcccggccaacatttaacacttattgcaaaactttcacaaaatatatcccagtttatactgaataaaatcttcttcttcaaacttcctctagcattgattaataatttttctgtctttgataatcaaagtaaggattgttcaaatctgcctatctttgataactactgaagtttagccatctttgaatgtttttatcgtccacctatatttctaatgttagtaattgtctgttcattctgtttgataattggtttttatttcttattaatctgtaaaagctattattaagaaatgtcatcaaccatttgttgtgtatattttaaacaattttcacaatttagtttccctttaatttcatttgtgatgtcatttgaaaaacaatttctatttttatgtccatttttcccctttggttctctgcctttgacgtcatgttacaaaggctgatctcactatcgcatcgacatttttctgattcctactcttttgtggtttcattttttaaacttgaatctttattacacctgtgacgatctaactttatgataaggttcttttttccaaatgatgagatggttgtcccaacaccatttctactttccccactgacttttactaaattccacttaacttctcaaaaagtatttgactatatctttattgcaaaagtcatactatacagacaatgcaaaaattctccttgacaaaagcctcattccatttctaattgcattctcttatcagaactaactgtaaatcagtttgatgtgtggaaatccagaggtttcttcatagtaaaaataactggcatttaggagggcttaccacatgtgcggccgtgccttaaggcatgtgtcaacttgtgtgatcttcccaacagcctaccaagtaggcacaacagctatctccattttaccattttacagaacaggaaactgagacacagagggtacagaactgagaaacctgctcagggatgcccagatggcagaatggggattcaaattcaggaatctagcttcaggatcggcagaatgttgactgatgtcctgctatctcctaatacacctacttgcacttcagtgaaaaacacatggcactattttcttttaaaatgaaagtttgaggctgggtgcagtggctcacacctgtaatcacagcactttggaacaccgaggcaggaggaatgtgtcccaccccttgcatgagcccaggagtttgaggtcgcagtgagccacaattgtgctattgcactccagcctgggcaaacagaaggagatcctgtctctaatgaatgaatgtctgaattaatgaataaatacataaagaaaaataaagttgggtctatggatttgatatcatactatccaaattatgctatagcctttttgatcaaatatcaatatctcttggttgtctttccatatgaattcatataaatcaatttcagtttttttaaactacgatacactatgatttactacagtttacgtaactcttctattagagtatagttaggttgtttctagcctttcaccatcagtaaggctgcaaagaacatctctagcatgactccctgtacatttttgtgaaagtttctcttgtttctcttttgttttttctcagtcatgtagtatgtgatttttttgtttgtttgtttgttgttgtttttgtttttgttttttttgagacaaggtctggctctgtcacctaggctggataggctggagtacagtggtgcaatcacgacacagcacactgcagtttctatcttctgggctcaagcaattctcctacctcagtctctcaagtagctgagcctacaggtaagcatcaccttgcctgcctgtcttttttatcttttgtagagacaagatctcactatgttgcccaggctggtctccaactccagagctcaagcaatcctcccaaagtgctgggattacaggcatgagccacacacccagcttgcatttttaaatttaacaaatactgccaaattgccctcccaactatctgaaccaatttataccccataagcaaaatatgatagtacttgtttctttataacatcccaacagttgatactatcaaacttattttcaatataatgagtgaaaaatgatacctccttgtgcattatttgggatgttcctcactactggtgaagttgagcaactttttatgcttattttccattttggttccccttttattcgttgcctgtttgtatatttttattatttcccctttgaattaatgatcttcttcttattgatttataaatgtttacatatattttggatgctaatcctttgtctattgcaaatgtaaatattttccaccagcatgtgttcttttaattttgtttatggtgtcttttcttgtttatagaaacttgtgtcatagagaagcttttaattttatttgggcaaacatcatattttcttttgtggtttatatgctatattttctttcgctcagtttgcaggttttatttttgtataacatttagctctttaatccatctggaatttactttggtgactagtgtaatgttaaaaatataattttgtttttacaaatagtatctaattttccacacaatttattctttcccttactaatatgaaatgccgatttttcccaaaattttatgtatatctatagggatctgtttctggactcattacgttgttctagttaaatttttagcttcaataccattctacgtcaattaatatagctttaaaatatatatattgatatttagtaaggtaggtgcacctcttgtttttcttctaaattatctttgtccttcttatgcatttactgtttcatatgaattctataatcagctagtcaagttccatataaatgctgttggacatggaatttttacatgagtttggggaaaatatctatctttacaatattaagcactgttatccaaaattaaggtatatatctctacatattagtatctattatgctcctcataagctgaggtttcttcctagatattctatagttttcattgctatgcgtgaatagggtaattttgcgaattgggtaattttatctatgactttttctaataagataatactattgtattaaaaactattagtttttatgtgtttattttgtactgggccattttataatactttcttattagctttaatggtttctcaactgattatcttattcttcctagggagcttggctgaaaaaaacaaaatgacactataatctctttctccattattcacatgcctttttaattttttcttattgtatagcgttggcaaagacctccaatacaatattgaatatagaagtgataggaaactttgtcttgctggtgactgaaatggaaatagtcctcatggtttcaccactgctaagtttctagtagaaatctttactttgataatggaagttttcttatatatttcatgtgcaagaatttttgagtgcctggggaggcgtttgtttgcttatcatgaaagagtaaattggaaaaaaaatgttttcacttctgttatgattttaatctcagatttatacaaggcttctagaacgaattgagtaacttcccaatttataacataagaattatctatttcttaaaggtgttatagaatgaaatattaaaaccatctggtcttgatgttttccctaaatgtatatttgtaactagctttctaattttctcaatagaaatagcatatttagactttctattacttcttgagctaattttgaaaatcacgcatttcatctagttttttagttattagtacaaagacactatcttacaaaatttaattccttctctatctgtaattacatcttatctcctttctcatgctgtttatttatgctctcttttttccttaaacttgaagaagtttttattgaccaactctactagctttgttgttcttgtttattttattaatgtcattttatctttattaattcctctcttcaactttctggagatttgatttttttgttctttgtagtctcctgaatattatgcttggttcatttgatttcaattttgctcattttctgatgtatgcatttaagtccataaattttcctctgataactgctttggccacatctcagaggttttaatatttaatgctctattgcttatttctaaatagtttgtaatttccactttttatttccttattaacagaagactttttgtaagtgtttttatatttatgagagtggagatttatttaatttctcttttagttattttctcatttgttcagggaatggaacttacatatccctacttcttagaatttgctgagattttctttgtaatctaacatattatcaatttgtgtaagtgatttatgtgtgtgtcaaaagaatgtgtgctataagcttgttaatacaaagttgttcattgtgtcatttaaattctctgtcattatttttgtctatttgaaatattcatttcttagacaactatgaaatttgaccttctgtgattgcaggtttgtcagtttctctttatatttctattaatttttgcttacattttccaaagcaacattgtgaaggacacaaaggtttacaattatatcttcttggtggctgttatttttaatattatgaactattcctctatgtactctaatgtacgccctctgactttatatgactcataaatcatattataaatttttaaagcagttaggccttcatcttgactctgtttctttccattgatttaactgattattttggggtaaataccacacttttgtctattgtggctttataagttaatttttatctgatagttaaattattgattactctaacattattcactcttccacatttaggtttattttgcaaaaccaccaacagaatccaatttaaaatgttgagtgaagtgccagattcagtggcatatgcctgtagtcctagctactcaggaggctgagaagggaggactgcttgagctcaggagttcaagtccagcccgggcaacgtaaaaagatcctgcctctcaacaattttttaaatttgttttcaattattggaaaagaattacttacaaatcaacttaggggcatttctctttatgtagcactgaagtctacttatatgcacctcacaaaaaatgtatttccttcatatatgacgggtccacttcttaagttaggggatttttttttttttggtattttgtattttgtgtcttcaatataaatagagtatttttccttatcttttatctctaacctttattcccagcataatatgtgggacatgttttatttacatgtatctgttttattattagacatattactgaattcctttataaggcataggagtatttcagatgatgttcttcagatttttcatattatcataaaatagtaaaaattttgacttgaccatttccatatttattccccaattgtttttattttgactgtcatttttatcatatcattatctaagacttgttttgttaccataacaataattcctacaactttttgttttatttgtattttaagttctggggtacacgtgcaggacatgcaggtttgttacataggtaaacgtgtgccatggtggtttgctgcacctatcaaagtattaagcctggcatgcattagctatttttcctgatgctctccctgctccaccctcctgtgacaggtcccagtgtgtgttgttcccctccctgtgttctctttccccatcagtgatagactggataaagaacatgtggtacttatacaccatggaatactatgcagccataaaaaggaatgagatcatgtcctttgcagggacgtgcatgaagctggaagccattatcctcagcaaactaatgcaggaacagaaaatcaaacaccacatgttctcacttacaacttttttatttttaagtatttgtaggctgttgttttgagatagattatcatataaaaccaagaaggctcaacattagtacaatcaatatgcagggctggataattctttgctgggggagggagagccctttcctgaacattgtaggatatttaggagtaaccttaacctctacttacaacataccagtagcactacctccaagtcatgacaatcaaaaacgtttccaggtactgcctcctgagaggcaatgtccttgattgagaaacagtatgcaatgcattatccttctcttcctattttaatcacagcttttggcaggactgatgttgaattttatcgaatgtccttttggcatatgattacatatttctcccaggtacctattgatgtaataaatttttaattatatattttctgatttggtgccatccttacaatagaggagaaaggctttattagtcaagatttattatttttaatataaggttagtgttcattttttatgacttttacctatatgtttacatgtgaggttgacttgtaggttttgtttgtttgtgacgtttgttaggtttgagcacaaaaataatgcttgcttggtaagtagcatgatcactttttgttccttaagacatttaaatcaatttcctatacaaccatccattttaatgtatttttacattattcttttcttattcaactactctatagttaagtttagtaatttgtaccacaatgagataccatctcacaccagtcagaatggtgattattaaaaagtcaagaaacaacagatgctggcaagtctgtggagaaataggaatgttcttacactgttggtaggaatgtaaattagttcaaccattgtgaaagacagtgtggtgattcctcaaagacctagaaccagaaatgccatttgacccagcaatcccattactgggtcaaaggaatataaatcattttattataaagatacatgcacatgtatgttcattgcagcactattcacaatagcgaatgcatggaatcaacccaaatgcccatcaatgatagactgaataaagaaaatgtggtacatatacaccatggaatactacgcagtcacaaaaaggaatgagatcgtgtctttgcagggacatggatggagctgaaagccattatcctcagcaaactgcaaactaatgcaggaacagaaaaccaaacaccacatgttcttacttataagtagaagctgaacaatgagaacacgtggacacagggaggggaacaacacacactggggcctgtggggggtgggatgtggggagggaaagcatcaggttaaatagttaattcatgcagggcttaatacccaggtgatgggttgatctgtgcagcaaaccaccatggcacatgtttacctgtgtaacaaacctgcacatcctgcacatgtatcccagaacttataattaaattaaattttaaaaacttagtaatttgaaatttcctagaaagtcatttatttcaacaaaattttctatgataatatatctatattttctaccacttttaactttttggaatacatgtatattctccttttttatttctaatgtttttacatgtgttttctcactctgtttcacttaagtaacttgtcagatgtctttgacaaattctaattcttagacttggcaatgtactgtctgttttctgatttactaagttatgttgtatctttatcaatatctttctagtttatttcattgttgtctttctaattattgtgagctaaaagcttaattcatgcatttttattctacattcaataatgtgatatttaaggctatgtgttttcttctgaatatagctttgagcatacatcataaggttgatatatggtattctcattgtaattattttctaaatagtctccaaatatagttttgatgtcctctttgatctaaaagataattcagagcggtcttaataattttagaaattgcccatcaaaattgtagttacccttctttgttgattgtataaaataagggatctgcccactttttgattctttgactatatccaaccttttttatagccaatatatactatttagtgaatatttcataggctttaatatagtctctcatttagaaaaaaatctcgatttaagaaacaactttattatttgaaatcatctaaatccttggattccttgcctactagatctgccaaataccaaaagagatgtcttaaagtttttcattacaactgtgaatctctccacttcttcttgtactcctaacaatcttgcttgctacatcttactgcaatgctatttggcatattgggagccatgactagttcagtctactagcctgtaagcccagcaaagacaggaatcacatctgacttgcctaacgttgagtcccagcccctggcccaatatttactaaataattgtgggaatcaattgacaagtgatagagattcagtgttgagtatatgaccttcaacaaaaatactttactattatatctaatttttttaccctcaattctactttgtctgatgcctagatagacagatagacagacagacagatagatggaatttttggagataggattttgctctgttgtccaagctagagtacagcagcatgatcacagctcactgcagcctcaacctcctgggctcaatggatcctcccacctcaacctcctaagtagctgggaccacaagcatgcacctccatgcccggctaatttctttttgctttttatagagatggggtctcgctacattgtctaggctggtttggaattcctgggctcaagtgatcctcctgccttggcttcctaaagtgctaggattacaggcgtgagccactacgccttgtcaatgatgtcagtatttgtccctgtattttgctggtttgttttacttgacatatattatatatcttgttgttgggttttggtgggtttttctgtttttgtttttgttttgctttgcttttttgtgtttctttatctgctccatccttagttctatgaaatctattttctttgtgattgtcttcaatatacagagatacagtttagaattcaagtcataaatggtttcaagtgtttccaatgtattacttaacctctatatttaactcctatgtttttctaattttcaggtcagagaggcaattgaatcttttagttcttttttttaacacaatgtagttaatacatttttattctcctcttccagaccccatgctactatttcttttccaagtactcctcagacacttattaaataaactaggactttataggttgattattactaatttttacacaataggactttgaaagtgaatttttaacacttgaattcagtttttcaaataaagtctcaattttttttttttttttttttttgagacggagtctcgctttgtcgcccaggctggagtgcagtggcatgattttggctcactgcaagctctgcctaccgggttcacgctattctcctgcctcccgagtaactgggactagaggcgcccgccaccacgcccagctaattttttgtatttttagtacagacggggtttcaccgtgttacccaggatggtctcgacctcctggcctcgtgacccgcctgccttggcctcgcaaagtgctgggattacgggcgtgagccaccacatctggccctgaagtctcaattacttagacagcattttttaaaagtataagtgaggtttgtccttcttcttctaggcaaagctgcacctctcaccccctataccagacagtcctttgctatggacacacagggtggtaggacacacaggattctcataggcagttctggttctcctatggaccaagtagcaccagtgcccaaaggcagccctctgccaatggttgtaggtgaggaagctaagagcaaagcatccgttggaagctggtagaagccaggcttggtggctcacactgtaatcccagcactttgcgaggctgaaacaggaggattgcttgagccccagagtacaagaccagcctgggcagtgtaaagaaaccaccccctcccccgcccccataaaaaaattaaaaacatagctgggtgtggtgctgcacacctgtaattccagctactctggaggctgaggctggaggatcacttgaggccaggagcttgagaccaacatgggcaacatagcaagatcctgtctctacaaaaaatttaaaaatttttagctgggcatggtggtgcatacctgtagtcccagctactagagaggctgaagcaggaggatttcttgagcccaggagttcaaggatacagtgagctatgatcacaccactgcactccagcctgggtgacagagcaagaccctgtctcaaagagaagaagaaaaggaagaagaagaagaagaggaggaggaggaggaggaggaagaagaagaagaagaggaggaggaggaggaagaagaagaggaagaagaagaggaagaggaggaggaggaggaggaagaggaagaggaagaagcagctggtagaaaaattggagggtctggacagggcaccagggatgtctgctacaccagcacaccagtgcaagcagcaggcgggggcagtgtccccaaagaccccccactgggctaggcttgagctgcagctgcacctgctgcaggtgacatgctcagcctgcccttctcacctggccatcacacgtggacttactcccatcttcagactttgtgtcaattgcatctcagccaaggtttccattaatgggttattatattatatcacctgcaaaacagagaaaaggagggctgttctaaaattctaacgtgaaaagtgagcgtgtcaaatgcagaatgtgcagacacagtgaccatggagtttaccactttattaaaattgtgattgttcacataaagactcaaacaggtcacatattaataattatcactgacaatctttaacatcagccgaagcccacaagtgaagcaatattacatctcccggtctcatttatcttactgcttatggcccctctgtggtcagcacgctgtgagctttgtggacatttaattatgagcacatcataaatggagctgacagggcagaggctgcccagggatgctcctggcaagggggtcacggtggaaagtagttagttgatgcaccctcccgaacagggcgtggcagagactgcttctccacgtggccccgctaccgttccctgttgcccactgcagaggcagtaggccggaatgtgttcagttattgacagccctctaactttcagaagcgtcagcccagttgccttaaaacctaagaccagccccacagtctctcctgtcccgcttagctctgagagtcccttggcttgcctctctgtgtgtcttcggctgtttacagagctctctaaatgtgggcttcactctgatgcacatgaagagggtggactttcttcccataccccaggggtccagagatcccactgtcctctccagctgtccccagtgtcttctgtgcaaaccactcagctctaacaaggtgcaaaggacagtgagggccccaagaacatcctggcccctcacctcaatgcaggaaatacctttccactacagcaaaaaaaaaagggactctgcaacgcaagtggtggggtggggagggcttttttgttcgcttctaattagccaccgctctgatgtgatagccaaggcgtcacgcactaataaggccacgcgtgtccccgagtggacctgggagagcagcaggacttccccatgtcatgtttcaaagcaactgtcctcggagggccgaggtacggattcctccactgccccagcaggctcgatggggaagacaaagcgtataataaggggcgtgcgatgaaggggctccgaggagaaagctgaaaagtagctatcatgttggcagataaattctacacacaattattcattcctagcctcttgacatgtagattaatgagtttgataacccaggcttctaagaagtagattccactctgttcgcaggctttctccccctctacctacaaacagcacacaggtctatggagaaaaaaacaaatcgatacatttgcagtggccatcactgctttttgtggttggagccctacgtcaaaaatatgatgtgtcttctccttcctggcgtgggagaagccagtcatggccaggcggaccctggaggggactgtgggcttcagatcttggactccactaagtcctggactctttttagtgggctgggcatggagcatttccaactccagtcccgagggaaaagggccatttattgacagagcagctgtagcctgctattgtgccttaggttgaagtccctgctggcagagttccaggtcagcacccagacatcctcgccaagaaagagccatatggaggaaggaatgacgcaggagcaggacagtcacacctacacccacgccaggtatttcacttaggaccggtgaacagcaccaaactccaacccaagtgtaaggagttcaaatccttgaaaagagaaattgggttcactgcattcatcaagatgatttggggtttatgttacgattccatcacccccaacccacagtgatgcagattttggagatgtattttgattatccattcctttgactttttagccatttggcaacagcatttctagatctcagcctcattttatttccttttcatcacgttggtgtttatgttctaaagataaaacacgtgggggaggtggagagggtagaggggaaggcttcccacctgatatcctgctaggaggttttatggccaccctcctctgccaggcaagccctctgggaaacagagtagacctcaaaaacctagagtggggccaggcacggtggctcatgcctgtaattccagcactttgggaggccgaggcagatggatcacttgtggccagaagttcgagaccagcctggccaacatggtgagaccctgtctctactaaaaatacaaaaattagcctggcaagatggtgggcgcctgtaatcccagctactcaggaggctgagacaggagagtcacttgaacctgggaggcatagatttcagtgagccgagattgcaccactgcactccagcctgggtgacaaagactctgagaaaaaaaaaatccctagagggagtagagggagccctgtctgggtgctgggtgactgaataattcacctcccccagtcatcacagattcaatgtctgtgaaatctgtgtggctgctggaaataaggggtacagggagatcattcttcaagacaccttcttttatcctccagaaagagaaatgaatggagtggaaattcacccagctcacaaaagtccaatgaggtctttgattagcaacatggatcagttcaagcatttgaatttcaacacagcttccatgccaacttcaaaagagacagccctgagctacacaaagagggaaaagtctctttcccctattcgagtagtcttgaggagccaggcttctcacagagtcttggggtgaggatcgccaggtttagcaaataaaaattcaggatgcccacttacatttgaatttcagataaacagggaatcattttttagtataaatatgtcccaaatatgcatggaactaaaaagataatttaccatatactaaatactaagataatataccaaaaaatattttagtattcgtatgtcctatgcatatttgagacatatttatactaaaaaattattcaatatctgaaattcaaatttaagcagacatctagtatttcatctgacaaccctattcagggtgtccttgtaaaactgctcagggaagaaccagggtgtgaccaaggagaaaagagcaaaaacaggctcaaaattcaagacagccacacccaggggcctcttccatccctccatctggcctctccgaaaacatcctgcttccttctgagcccaaagctccaaccactgaaagaaaacttggaccattgttcctgagtagatgagaagcctccatctccggcttccagggctctgtatataagaccctaaactggagggtatggggctgggaggacaccaaggtagacctcaagaaaccagagcccatgggactgtccttgacagctgccttcctgctccccgaatacagaacctcctacctcaccacggcccagttgggctttttctagaagacagcggaggtttggaggtcctactctcccacctggcctggcagaaatcccagaacagaactacagaatgcaattggggcagggagtggggagaaaatccagcactgcttcctttttcaaatcaattatggccagactgactcatcttctctcatagaccagaaagtcccacatcttgttgtttcttaatcatatggaaacctaaatatagacatatctgcagaaggacaagctgagaaaaccagtatccttgttctcccaggggaaagctcgattctcactcttttctcctgggttttagttttgggactgtgttcccagtagtgcacagagcatgcgcctgttggggcaatggcagcaactcagacctacttccaggtctgctgctgcgcctgggtccccatcacataccgcttgatcttgcctctggaaagacctccatcttccatcccaccgtgagagcaatatgatgagaaggaagccaggcacctcagtcacatctcagcagagggcctttgtgaatggaaccctcactgatgtctggccttgagcagacacccaaggctgcaggctccagagatgatctcagcagaagagtcccactgagcaccaggccaggcatagtggagtcaatcaggcacccaggaggaagcaggacccctgcaatgctttgcgtcccagtccttcttcccttcactcatttctgggaaacagcacaaaggatggctttattgggaaatagcttattacccttctggaagggtcttgaggccccaagtttcagaaagctggggccacggagaaaatgtagctgtgctgcacagaacagagatgcaaatgagatagccaatcctatgatcctaacaaaagtcagtttgtccggaaaaagcattttagaggagatcaaagtcatgtcagagtagccacgaaaaagctttagcaaagcacagtggtcagatttagcaatgagaataatgagaccagggaagagcggccagtagcctgggattctttggtgcaacatgaatgaggacaaaatcaggatgtcattgacagccaaccaacagcccaggcttcatgcagcaggcaacctgggcagcaggacctggacttcaaggctaaaggagcgtctgtcagctaactctcctgctgtctccacgccatgcccaaagcacaatctaatatcttcctggcatccctagacaagaggtggaaacctggcagctcataagccacaatacagcccacaatcttgctcagttcaaacagtagtgggtaaatatttgaattaattgctaatattttaaaagcagatttgggactcggtgcagtggctcacgtctgtagtcccagtaccctgggaggctgaggtgggcagatcacttgaggtgaggagttcgggaccagcctggcctacatggtgaaaccccctctctattaaaatacaaaactagctaggtgtggtggctcatgcctgtagtcccagctacttgaggggctgaggcaggagaatcacttgaacctgggaggcagaggttgcagtgcaccgagattgtaccgctgcactccagcctgggcaacagagcgatactctctctcaaaaaaaaaaaaagaaaaaagaaaaaaaattagccaggcatggtggtgggcatctgtaatcccggctactcaggaggctgaggcaagagaattgcttgaacctgggaggcagaggttgcagtgaaccaagatcatgccactgcactccagcctgggcaagagatggagatttggtctcaaaaaaaaaaaaaagaaaaaatgaaaaaaatcagatttcgcaggaaaatccagatttcaggtttcttttgaaaaatcagaagatctgacaacactgggcctgtgtctgattgacaggagccaagggacagcctcccttagatacggcacatccttgccagttctccgcagtccccagcactccctattgcctaacctctgctccgtgggtcggtgcactgtgaaggccctgcccttggcaccaaaggaccacaacaggaacacaagcacctctaccctccccagaagccttttcccactggtcccctcccatctctcagaagaaccattattctaggcaccttccctcctataacttcaggtccccaagggcctgtgatctgccatctaccaccccaatagaggcatacgtgcataagacaaaaaccccagtgtcttggaaactgtctagaaaataatttaaataacagacatcgcagcatttttagaccaaaaaaaaaatgtaacaaagtcatgcccaaggcccagggttaaatgcaacccacatggcaagaatgacatgcccatttcacagactgtggcatcagaggtcaaagtcctatttcccctgactctattccctttaattttcaggatgaatggctcacccgtgggggtggaggggcaggaagtttcatcaatgtattaagtgttgaagggggaaaaagttctgatgggctgattcaggaattgggattctgggcagagctttacaaaaggataatgtatctttaagcctaggtgcccttcagggaatgtattggataaatgtcttctgaaaagcctgtaaatattccatcgcctcactgtcattactaccatgaaatgaaaatgaagcatgaaagaaatataattccatattcagatgacagcattagcctccataagcaaactgaaatatttattagtaaaatgttcagtatctacgcctgtaatctaaaaaaaggacaaaaatgttttataataaaaaagagattgaatgcagaggtaaaatctggttggctgattttattgcttattattaaatcctggcaaaacaattatttttttcttttcattagtaagacacccaaattaaaactctgccctccggctgcaaggtttacagtagtgattaaaaacaaggaattgtgatgcatggggcttttgacaatggcataatcaaattcattcatattgttcaatctttcactgacaaatatttttacagtgaaatataccaaacaaagaatcacatagaacaactatcaatacagagaaattaggaaaaccttgttattatttaaatagtgaactgataccacgttgtcataatcttgaatacaaacattatactgtagttaattagggtaattattgtctagattgtgcttaattgtcttatgctgaataggacgtatgaatgatgctttttgagctttctataatacctaagtgccgccaaactatttctttataatttaataggttttgatggtatttcctataagtcccaaaatacatctgaatacaagctaagagataaacatgaaccataggccttgacctctgtttcaccttattgaaaaggaggcgtaagagagtcatttagtataccagcgtcacagagcattcccgcaccctgagcacattccttaaaggaaagggaaaaggaaaaaaaaaaaaaaaaacagagtctttgaagtgaatgaaaaattagaaattcaagtgaccacgatcaattctgaaacactgcacaaaattaattacagtttggcatcagaagcaagaatgtagatttcagacagtcggtgtcatttatctcgagccgcacaatatacaaagcgattaaaagccaaatctgtccccacctcccaagtctaaggcctctcagaggctgtgaagtacaaatgattaactccaaattatgcgagggactgggcagccgcttcagcttgaatggagtgtgtggcaagtcgcagacgctggagaaggacagatttgcggctttttatcaaaatccagtctggccaaccattgacggactccagataaattacccagggatctgacagtggctgcagaaagctggctcggcaaaatccaaatctctaatttctatctgtttttaattgcttgccttaaatttgcatttggtttaaaggatttattctattctataggctactctgaccaaattgctttctatttcacatagagttgcaggaacctgtcttaggaggcggggaaagatgtggctttttaatcacttttaatatgcaagttcagtgtcttgaatacacctaggctagggagatcccctgccctctctaaatcctgggattagtccaagaagctatcagtgcccaggtgctactcagacgtcctcggcctctcctacccagaaaaaccccacagagaaacccagccataccctccttccttcatctggggccccattctcattagcccccgttagaaaaggcaggacatgcgtgtgttcaaaatacatcttattctgttgtcaaaactcactcagtattaaaaaggctgacagattttccctacaccaagaaaccacacatgcagtgtcacacacacacacacacacacacacacaagctgggtgcctgcttcatttaaccttgcatttgtaaccagtttattaacacgaggattgccaagtgaaaaactgtcattttaagatttgcaaattgagcctcacctcacaaacccttagattctgagcaattggcttcgggtttctgggtgaaaccagggctgccctcaccagctgtgattgactgagctgtacctgacttaacccaggttctctcccacctgcccctactgaatactctccaccctttcactggggatttcttaaacacagctggagatatcgcattgcagaagcttccctatggcccagtgcttcagctaagcaagtctatttatcccattggtctcagacacaaatggctactgatccagggaggttgcacaggacggagaaagactgagcttgaggaaggtccatctcccatttccctccatttcatggaaacagacatttcttcatttcctgcagcaaaaaaacaacgtaagcacaatagaaacagcaactgggctgggcgtagtggctcatgcctataatcccagcactttgggaggccaaagcaggtagatcacttgaggtcaggagttcgagaccagcctggccaacatggtgaaaccctgtctctactaaaatacaaaaattagccaggcatggtggtgggtgcctgtaaccccagctactagggaggctgaggcagaagaattgcttgaacccgggaggcagaggttgcagtgagctgagatcaaaccactgcactccagcctgggcaacagagcaacacactgtctcaaaaaaaaagaagcagcaactggccctctgcccagtgtcagagacactagggagtggtggggactgtggctaactttaaacgcctgatccttctgaaggaggcagctgcgtttctactcacatacatgttaccgtaacgaaaagaaggtccacgttgccagatactctgaattttcagcaaaatctggattctttccaaaaatttaaatgttgattcacattttaaaggcaaatagaagaacactctactgggcaaatataaacacttctgatggccacatccaatccggagcccccaatttatgacctcaggtccttatttttggtgattgtcattgtcaaatggctgcaaagagacatctcaggattccaaagggcagattacccccttcaacacttatgatagaagcatgccgtaacagcggtgcctgaattcctccttgtcttatgcttactgcccccaatggcctcatcttggagtgacccctggtgccataaccttgaacaacttaagggctttggtccagctcagggtctatctccatggcactttcagtctctggaagcagccttgactcacttttttttttaatccttggacttttagagaagttacacaaatgcctaaaaattgtgagtccaggatgtgcaggcaaaggccaggcatggtgactcacacctgtaatcccagcactttgggaggccaaagtgggtggatcacctgaggtcaggagctcgagaccagactggccaacatggtgaaaccccatctctactaaaaatacaaaaaattagccaggcatagtggcacatgcctgtaatcccagctactcgggaagctgaggcaggagaaacacttgaacctgggaggtggaggttgcagtgagccaagatcgcacgattgcactcctgcttgggcaacaaaggcgaaacccagtctcaaaaaaaaaaaaaaaaagatatgcaggcaagtttgctggtcccagcccaccctgctttctgcagctccaggctggatcatctccagctgagtgcaaacatcagcttccacccacacagtccccctgctcatgggtcctgggctgcatttttctccagaccgacttcccactgctgtgatcagctcagtggcatctattagagagagaaagatgtgctctgctactgtagggtaccctcaagctgcatcctgccaatgcccatcagtaagccttacagagcgaggaggaaagagagaaggcactacgctggggccccaaccaaatgcctccccaaagcaaccaataactcaccactgattactagccaaggaaacactcagctcccatactgtggcagctccctgtcttggctctcctgactgcaaatgccatgacagtgaccactgcatccctttatagcaccctgggcttgcactggattatttatgctgaggaagtgtggccaggtggagggtgcaatggatgtaaaatcagaagcgcgcagaggctgtagcacgttcagtaagtcataggaactcagagcttctgtttaagcatctagaaatagagtttatatcacccgccttacaggtgctagatgaagtttttttcttttagacaaggtttcactctagagtgccatggtatgatcatagctcattgcaacctcgaactcctggactgaaacaatcctcctgcctcagcttccctagtagctggaaccacaggtgctcactaccatagttggctaatttatttttgtttttagtagagacagtgtcttgctttgttgcccaggctggtctctaactcctgggctcaagcaatcctcctgtcagcctcccaaagtgctaggattaaaggtgtgagccaccgtgcctggctgatgctggaagaattaaatttgcagtttatatatgtcaaatcatcatgtaaacactatgaatgagtctcttttttcagggttatgtggctgctctgtgcacaatgcacagtgactggtgtcagccctgcgtctcaaaactcccaccccacggcagcaacatcttttgaaataaaattggtggaatattgtttctaggaaactcggtttataatagtttcaagatgcatttattcaaccatgggaaaaacataagaaaataagagtgcatggttcctaccctcaaggagcttccaatctatttgcaaggcagagatggtggtggaataaagtaggtagttgtagtgaggtccagacatctgaaaagttgagtcccacaggccaggccaaagtcataacctggtttgtcttccccagccctgagaaacagttttctgactgctcataccagaatcaaaacatacagaatttgaatccccctgaaaataaacactcaccttcctaaaaacagagacttgagcaggaggtctctcttgctatcacatcccaaggtgtggggaaaaaatgcaggtggttttcctgccctacagtgagtcccccaccagggtcaggaaatgagatgacatttgagaaagggtcttatcagccgtcatctttattccagcattgtcttcatcaaaagtattaaattcaataagctcaaagtattagagagaaaacagaagggttggctttgggcatctatgaagcagaaagcttcaggtttagcaacttaggaaattatctttgtaaaatatcagaactttgaggagttcaggcaatatttatcaatagcattttttcactctgcattcgtgattcgagctgcaagactccaccatgtgaagttagcagaatgtctgtcttgctgttctgaacacaaaattggagtcacagacattcacatcgacacctcgaaactaccactcctgagaggccaggatgccacaaatcaacctgaataaccaaatcctccgagagagcaaaaaacaaccttcccctgcctcagaagagaccagcgcccagttcaccctcttcagaaataccatttgtacttttcagaatcagaatgtgaccttacaatgaggaaacaaaggatcagagaggtgaaaccacttgcagaaagactcacagcaagttagcgaccaacctgagaccaggatgccaatctagggctccctctctgctcctgcaaggtaggggaactcctctattgactcttgaatatctccacgttcatagggggctgttggagaccttggagaaggacaagttcagctgtcctcaggcctgagagcagaacctgctcaattgtcattcctgagcttcccccatgagctcacgctacagatgggtgcacatcagaaccgcacatcagaggcatgcaaagtcatccactgaggctagcaggggtaaacacataaaaaatgttcacagggccttcaggaaggcacggatgaaacaaatctcaaattgcaggagaactttccaaagcataaccatccaaaggatgtggtgtgtacatggccatctcagaaaatttcaacagaaaaggaggtatcatttaaattagaagggggtacccaaagaaaatgttcacagggcatgtttcattgactctgtacttggcagtggaccttagagagactctgacaataacaatgcacattgcatggttttcatttcagattagctattggatacctcacaacccaaagcttagtcttctcagagaacctccatagccaacagcaatgcatcatattgttaaatgaaagccaaataagtttcattagaaaaggcaatgagggagctgggcacagtgctcccacctgtaatcccagcactttgggaggccaaggcaggaagattgcttgagcccaggggttccaggccagtctgggaaacaaagtgaggtcctgtctctacaaaaagaattaaaaattagccaggcatggtggtgtgcacctgtagtcctagctacttgggaggatggcttgagcccaggaggtggaggctgcagtgacctatgattgagccactgcactccagcctaggcaaaggagcaagatcctgtctcaaaaaagaaggaaaggaaggcagggaggaaggcaggcaggaaggcaggcaggagggagggaggaagggaggaaaggcaggaaggcaggaaggcaggaaggcaggaaggaaggaaggaaggaaggaaggaaggaaggaaggaaggaaggaaggaaggaaggaaggaaaatgatctaagggtcacagtgggccaccactaataataagtcaggattgtgaggcaaggtggtacagtggaaagagggaaggcaaaagtccctattctgcaactaacactagacaagcttctccttagatctcaatcctcccagccataaaatgggggaggaaataataccccttctatcattcttagaaggttggtttataggctcaaaagaagggatacaatgcacatgcataaggctttactgctgagatgctggccctagggactagcaaatgtatggacttgaccctcccatgatgtgagtctttttttagttgttggagtctcactgtgttgcccaagctggaatgcagtggctactcagaggcatactcacaactcactgtggccttcaactcctgggtgcaagcaatcctcccacctcagcctcccaagtagctgggactacagaaatggaccaccacagccaactagtttttttatgaatattttttgtagagatggggtcttgctatgttgcccaggccggtctggaactgctggcctcatgcaatcctcccgcctcagcctcctgagtaactgggaccactgggaccacaggcacatgccactgcattctgcttaaaacagtaacgacatgtataactgacttcaataataacaacagctaatattattattaaagagctcactccaagcccacatgtggagagagagaatttctgcaagtcagggcaaataaagggttgggtcagaggcctcgctgatggctggaacggaggaaggagagagttggtgggcgctatcttacccatttctctctcctaccctggaagacgaaagccctcatagagaaaagccaagatgccccagctgactgcctgccagccaatcccagacgtgccagggaagccaacctagatcacccagctgcccattaacctgccagctgaatgcacagcaagcccagcagaaaccagccaaagggcccagacagtagcagtgtccagccaaactcagagtggtagttcctttaagtccctaagccttgagctggtttgttatgcagcagtagctaagacaccaatcaaacaacctccttgtacagataacaagaccaaggcccaggaacatctcctgctgttccctctgcagcctcagcctatctgatccatccctctctctgcctccagagcgacagttccaaatgcaaatttcatcaagtctctgccctcccaggacccctacgtggctccccagggtcccacagaactgctcaaactcctcctcacctggcagccccaggccagccttccacccacacctttccatatggattctctggcactccccagaagtttgtcgtggtgctgcccaaaaagagcaaagtcccccagaacaccaagccagctatccctgctctcagctggcagcacctctccctggaccggaatgccagtcctccggccacccttgccctggctcacggcttctgagtatcttcctgagcatccactctgccctggagctcagtcccctgagatctggggctcttactcaccttggagtagtccgcagagcttggcatgggccctggattccctgggcgctgctaagtctccaccatggctgctgcagccactgctggtgaggcatggtcaccccagcctcaccccagggggagagttcaggtcgcgtgatgagacggaaggagcactgggttcaagacatgccccttctacttgccaccatgtgaccaagaggcaggtgatctaaacggctcagaggcttggtttcctcatttgcaaaatgaagctgataattcctgccccattcacagggacgctgactgtgaaagccaaaattcactggagactcatctgtgccaggtgacctcttagtatgccagccacccctttcactaaatggcaggaatgtccgacccttgcatggcatatccacccaaagccatttctgccactgtgcaacttgtgttataccataaacattgttctctctctctctctcccactgggaaaggccatcccagcatctttgaagtccccactgcactgggcaggatatctggggaaatcaggggttctgtcaaattggcccatttcacagatttcagaaatctttaaaaccacacctctggtcatagggagtgtgtgtagtgatcctaaaaaatttaaaaaaaaaaaaaaaaaaaaaggtctggaagcagtggctcacacctgtaatcccagcactttgggaggccaaggcaggatgatcacttgagcccaagagtttgagaccagcctgggcaatgtagcgagaccccatatatgaaaaataaaagaaaaaattagctgggcatggtgatgtgtacctataattccagtttctctggaggccaaggcaggaggatcacttgaacccaggaggttaaggctgaagagggctatgataaaaccactgcgttccagcctgggcaacatagcaagaccctatctctaaaaaataattggtcgagcatggtggctcaagcctgtaatcccagcactttgggaggccagggcaggtggatcacctgaggtcaggagttcgagaccagcctggccaacatggcgaaaacccttctctactacaaatacaaaaattagccgggcatggtgatgcatgcctgtagtcccagccacccgggaggctaaggcaggagaatcgcttgaacctgggaggtgaaagtcgcagtgagccaagatcgtgccattgcactccagcttcagggaccgagctagactctgtctgaaaataataataataataaaaataattttaaaactacctgggcatgcttgcatgcacctatagtcctagctacctcttagctagtcaggaggctaaggcacaaggaatacttgagcccaggagttcaaggctgcagtgagctatgatcacaccactgtactccagcctgggtgacacagtaagaccctgtctctaaaaaataaaaataaaatttaaaagatgacctgcgctaggcacagcctgccaacctgagtggctcagatgacagccctccctaggaagtgaaggttgaaagcagaggcccccagaccccacctgcatggcctgtgtagtctctacacctaagcttcacttcctcaccttcgaccacatgcttggtgaaatgggaaataggagaagctgctttataaaaataaaaatgaaaatgcaattgtctgaccaataaaaagcattcctgtatgtaatcccagtaatagattttttaatcctcggctgacacactgttatgtgttcacagttattatctgtccacttccaaaccttaagaggttagattgtttaaagatttgttagctatgaactgcttaaagaaggcgaagtataaacttctagctaattgaaaaatagcattttatcagattttcctctgatattatattgtaatggttgtacttagagcactctcaatacttcaataagtggagaaatttaaaaaataacatcttcagggctttgcagaaaatgtggctgttaccaatttatactgcttttttaaccattattttcttatatttcccacaatgctttggatcagaagcaaacagaaactgagtgattaccccaaagtgtgctagatgaactggaaaaagtctattcaaacaaagctcattagttctgatacctccagggctatgacaaattaagcggctggtgagtgcgcttgcacacaaaagaatggtgccgaaaactagggctgagctaggcgctgtgtcaataaattcccctgaaaaaggtaaaaattacaattggagttaaaatggaatccctttaaggagcatgtacaaaatagatcatcccttctttcttaagtacatttgtgaacccgcccgtgatgaattattgcagcccgggaagtggccactcaagaggggttgcttggccaggtgcacatcggagtcgtgggctgctccaggcttccacctcactcctctgcaaagacttggccctgctgggaggaaagtgttttagagcccaacaagcagagcgtacatgctcaaagacggaagtcccggtctgcagctttgcctactgggctccaggtgaggggctgcgctattcccaaagccaggtgggcagcctcccagctttgaagtgctccatgaccttgagatcaccttgttttctcagccaaaggaggactgtgcattgtaaccatgggatctctttttcctggtttgggaatcagtgtctatgagggttcatagaaaattcttaaaagtagttgtgcttttaacaaatctgtcgcctagaagcttaaataaatattacagcattggataatgtcttttaataacgaataaatattattattagacactggagactaggaaaggtaagagggtgggaaggtgggaggcggtgagggatgagaaattacctgctagatacaaatgttcacaattcaggtgatggttacactaacagcccagacttcaccactaggcaatatatccctgcaacgtaactgcaccttctaaatctaaatctttgtttcgttttcttgttttttgttttttgttttttgtttttttgtttttttgttgttttttttttgagatggagtctcgctctgtcacccaggctggagtccagtggcacgatctcggctcactgcaagctccgcctcccaggttcacgccattctcctgcctcagcctcctgagtagctgggactacaggcacccgccaccacgccctgctaattttttgtatttttagtagagatggggtttcaccgtgttagccaggatggtctcgatcccctgacctcatgatccgcccgcctcagcctcccaaagtgctgggattacaggcatgagccgccgcgccaggcctctaaatctattttttaacattttaaatgttgaattaatgagcaaggctttagggtaagatcacaatatgagggaaggagggtatcaggactggatgcagattctacagatggtccttgggttctctggaagacatggtggccacacatgcccaccagactaaggcatctgtgggtgcctcacagtgctccgtgacctcaatggcagaatttctgtgccacagagaatcttgacttaacaatgattccctggctatccaagtggggaaaaccctctgagagcacccagtccctagaggaacaagggccaaattgaacccacagaatttttgccccatacagtgttgtttttcctctttaatggaaatatttgccacttagaaatcagaaatttcccacaaatgttcagattcccagctcctttgggaacttgaaagatgtagccaaaatggacccatattgccacacagcagaaatgtccaggcagcatcgcagatgccccatttaacaaacacacacactccagcctcggggggccactcccagcccacagcacacaggtattctaacatcctggcccctgaaggtatctgagttcacagcctctgatctggtcaatcatcagtctagtagacatggagaaaataagacccagaaagcaggggtagcttgcaggggctacagtgggagcacagcttcaggactagacttcaagtcttggcatccccagtgccatgttcactgaagctctccaccatcctagccccagtggagtgaattcctctctcgtttgtgtctacttctctgccatgttcagatttctctcaatccccctatctggccattcacccatccaggtgaggtaccagactttgggctagactctgtcatgtaatcatctgcttagagtccatctccaccactgtctatgagcaatttgaggatgggagggatgtggtaatgatctctatctgcagtgcctagcacacagtaggtctagcaaaatcctgcctccttttcatcaagcaatctcatggcatccttcagactctgcatcctgaatcttgatggccatatacaataactaagcccaagaccaccatgaccaccagtctcttcttcaacacgtgaccaatcagccatctcagaccacacatttctgacacaggcctctatattctggccttccttaggtccgctgaggtcactgagaacacctggtggccccagaaggttcattccctccaggtaggtagggaaaggacattctttgtggacccttctgctttatgtttatattttattttatttattttattttattttttgagatggagtctcactctgtcgccaggctggagtgcagtggcacgatcttggctcactgcaacctccaactccctggttcatgcatttctcctgcctcagcctcccgagcagctgggattacaggcatgtgccaacacgcccagctaatttttgtatttttagtagagacatgggttcaccatgttggccaggatggtctcgatctcctgacctcgtgatccgcctgtctcggcctcccaaagttctgggattacaggcgtgagccaccactttatgtttatttttacttacatttccggaaccagtgacatggagggacaattcttcccacgttgatgcatgctgtcgcctaaacatgaactgtttttgcaatcccgcctcagggagtcatagctgttgcatggaggcatgcgattccaaggtccaaggaccacaggggaggcgagggtcaggggctgcaaagcccatgaaggaaaacagcaggtccggacctctgtgctcccccaaagcccaaccgcctttcactgcgcaggtagctccaggcatggcatccgctgctgtagagaagttacaaacaagagcacaaaggcatcaagttttttacttttgtctttcttcctttttttttttttttcaacagagtctcactgtcttgcccagactggattgcagtggtgcaatcatggctcactgcagcctcagcctcccaggctcaagcgaacctcccgcctcagcctctgggactacaggcacacgccaccacactcagctcatttttttattttttataaagatgaggtctcactatgttgcccggggttggcctcaaactcctggcctcaaagaatcctcccaccttggcctcccgaaatgctaggattacaggtgtgagccaccacacccagccatctttcaaaagttgagaagcgggtgggaaaacattaggagtcacatacaacccaggtgctcccatcactcaatcaatactgattgatcaaaggggagaacagtacaaagtgtgaggctggtagggctgtctgaggacacctgggtcccatcccccaacttagcaggatccaacattatattagttcattttcatgctgctgataatgacatacccgagactgcataatttataaagaaaaagaggtttatagactcacagtttcatgtggctggggaggcctcacaatcatggcagaaggcaaaaaggtatgtcttacatggtggcaggcaagaaagagattgtgcagggaaattcccctttgtaaagccatcagatcttgtgagacttatccactatcacgagaacagtataagggaaaccacctccatgattcaattatctcccactgggtccctcccacaacacttgggaattatgggagctaaaattcaagttgagatttgggtggggacacagccagaccatatctaacatcctgcggaactccctgcaccactaggctgggagggaaaggacatgtttgatcacgtggggaacaggtaggtctgaatcagcccctctcagttaccccatgctccagagctgtccaggaaaacaaccaacctttcccctacacctgggaagaaggtgcaattggatgggagagaaagcatatggagctggggcgccaggcttcaagatgcgggccaggctcatcttgtatatttattgcagcactatttacaatagcaaagacttggaaccaacccaaatgcccatcagtgatagactggataaagaaaatgtggcacatatacaccatggaatactatgcagccataaaaaagaatgagttcatgtcctttgcagggacatgcatgaagctggaaaccataattctcagcaaactaacacaggaacagaaaaccaaacactgcatgttctcactcataagtgggagctgaataatgagaacacatggacacagggagagaagcaacacacactgaggcctgtcaggggttgggggacaaggggagggagagcattaggacaaatacctaatgcatgtggggcttaaaacctagatgacaggttgataggtacagcaaaccaccatggcacatgtatacctatgtaacctgcacattctgcacatatatccaagaacttgaagtaaaattaaaaaaaaaaaaaagatgagggccaggcaggggcagacatgtcatggatgtgggaagtcataggcagcagcactgaaggacccctggctggccctagtgcctgtgcacaagccacgccctccatcccacggagaagaggggtggggaatcctcacctcaactgaggaacctccaattaactgtgtttccccagaacggattagattgagcctctaccactgagcacacaggggtttgaaacagagactcatctgatttacagaagcataaagaaagttgcagtatttccgcacctggtacctctgactttgtcaccgccacacagtatgctggaaagcagcttccccaggagtatcccccctcccctgctcaaccctggggggtttagaggaagaaggagaacaggtccagctgctgcctaaaaattcctgggcatacagaggtcagtgtagggggaagagggcatcctgagggcagggcggcagtggggcaactgaaaggctgttttctggtttgtccacaggcagggagtaggaagatcctagtggcagaagcctgctggcatcaacagcctggcaggggctctctgaagcctagcccacccttagtcagaagcgcaggaatggctgtgatgggactgaagcattcatgatggccccaggccagagacatcccggagctgagctccccagggctactccaggcctgggccaggtaagcagatgagtagactcaggggtcagcaggcacacagcaaaacaggggtccctctcctctattgcacagtgcttcctcctctccacccccaatgcccctcaagcccttgccatctcaattctccttctcgttggattctggggtccttctcctctacttcccccttaccccttctcctgacaatcccttctcatgcctcctaaatgtagaatttcctgaggttctgagctcacctgtcctctctctcatgtctcttcccagtgaccttgtgctcacacctccagggaagtgacctccacgtgtccagttcccaccccagcccctatcccaggctcagcttcccactcaggggcccactcacactctgatgcagtctcagtgtctccaatctattcccaagaacaactcatctctgtcatggtccccccactgccccaaggaggtaaggccaggagggaaggcacctgcgttggggtgttggggagtgtgttgtggttggggtgttggggagtgagccttctccacacatcctgccgtggtgttttcacaatcttttgctaatgtttcattcatatatatatatacatatatatatatacacacacacacacatatatatatatatacacacacatatgtatatatacatatatatatatatattttttttttttttttgggagacagagtctcactctgtcacccaggctgaagtgcagtggtgcgatatcggctcactgcaagctccgcctcccgggttcacgtcattctcctgcctcagcctcctgagtagctgagactacaggcgtccgccactacgccctgttaattttttgtatttttagtagagacggggtttcaccatgttagccaggatggtcttgatctcctgatctcatgatccacctgcctcagcctcccaaagtgctgggattacaggcatgagccgccgtgcctggcatttttttttttttttgagatggagtctcactctgtcacccaggctggagtgcagtggcatgatcttggctccctgcaacctctgtctcccaggttcaagtgatcctcattcctcagcctccagagtaaccaggattacaggcacctgccaccacgcccagctaattttttgtatttttagtagagatggggttttaccatgttggccaggctagcctcgaactcctgacctcaggtgatccacccacctcagcctcccaaagtgctgggattacaggcatgagccaccacgcctggcgtttcttcagtatattatcaccatgccaacatggtacccttaaaaaggggccctaccattgcaaacaggggtctctgttggagggtgtgcttaggagaacgtcgctccctcccggtgtgcctctctgtcacctgccacatcctactcatccttcttgcatctgctttaggcccctccttcagaggagcctgccctgaccactgagaccaggtcagtctctctgctatgtgctctctttcctcaaaatatttatcataattcaattaacgatctgtgcgataattaatctaatgtattccttctctcctgctggattgcaggtttcatagcagaagcgataggaggctctcttactagcatggtgcttgtacacagtaggcactcaacaaatgcttgaaatgagagggcacatttcttcatttttaatagatgcttggtgggaactagccacatgtgattggaatttttattatacaccattgtgataaatttgtacccaaattacctattcagtaatctaacagggtaaacatatagtccctacagcttctagaaagatgcctgtgcccctcaccaaggaaaacagttaagccgtccccctgctcaacccccacccccaaagaagagcccaccaaaggccaagcctcctaatcgaatttagctcttgtacccataatcccagcactttgagaggtggaggaggtaggagttcaagaccaacctgggcaatatagcaagacgccacctctatgaagaaaatttaaaaaaaattagctgggcgcagtggagcacatctgtagtcccagctactcaggaggctgaggtgggagaatcttgtgagcccaagagttgaaggctgcagtgagctgtgatcacatcactgcactccagcctgggtgagatatagtaagataatgttgaaaggtagagggaggggggagagagagagaggggaggaaggacaaacactagtaaatagagagagagaaaagagaaggaaggaaagaaagaaggagggaaggaaggaaggaaggaaagggaaggaaggggaagtgaagggaagggaaggaaggaaggaaggaaggaaggaagaaggaagaaggaaggaaggaaggacaaacactagtaaatagtccagaaccgttgcccctgagcttcaagatacctgagtgcttgaaatatagcaaatccactctactgcccatcactggtaaaatgcggagaatgacccagctggccccagagagccccacatggctggcactgagcacttcctaataagcctgtccttctgatcagctccttccctgcacatccacccatcgacatgacagtatcttggaaatgtggagagttttttcatggcacaagtaatagatgcttattcttgagaaatgtgtacatatggataagcaaaatgaaaccacccacaatttcacctttcacctaaaacaccatgactgttggcattttggtggactcccttcccactttcctatctgtagcctctcaattggctccttctcaataagctctacattttgaggtgcagggggttcatctcttctctagctgcactcatgcccttggcacctgcccgatccccttgcttcagctattagctccctgttgccagttcccaggtctacatctcagcccagcctccctccctaattccaggctctaagctcccagtcatcgccacctggatgcctactccatgtctcaaactcagtatgtccaaaaatgttcctccaaagctgcataaaataaaaagtccaggataaacaaaacagcaaaattttaaatcaagacaagacccagccctgcactggcacgtcactctcttcattttaatccccacccttttggattctgtctttatttagaatgttgatattttgttcatcaagagtttttgcattaattttcactttttaaaatattgcattaaaatatgattcagctttatggctgagttttctggcacacctttaaatggtgcacctgaagtgagtgtctcactccccaacttctaatcccaaactcgcccccccacttcttggccaccactgtacaaccaacagcccaggcacacacctagtgtctctggcatctcaagtcacttctagacttacaggaagcacctcatctctgagtatggagccgatgttctgagaagctgccaaaagtgatacccagaagatgcaatgcaaaaatgtggggaaggtactccccacagagtgaactgtgaccagggggaaaggagaaaagggaaggagccaggcacactaatttctcttccctgtcacccaccgactacttagagacagagtttctgcacacacccgatctggagaagatggagacgccaagcagaggcacctgctaagccacctgctgtgtctctccccagccagcatggggcaggaccatacacatttcttcccatccctctatgcttcatgcctcctctctctttcccccttctctctctctctctctgtctctctctctctctctctctctctctctctgcctgcagtttgcacctcccaaatgaagcatcagccctttaatccttgcctcaagctctgttttccagagagcctgagctatggcaggtctgcttctggattttttgtgtttcgtcatcttgatctattttgtgcctttaaaatgcattttcatatctaatacaaattcttcatcattcttccccgccccccccaaattcccttgcctattattactcatttaatcatccaaatgaactttcctacagttaaattctgggagaaagaaatcgctttctatttttcaagtcatcttcgcatttattatcttttttccatgcaacacaaatacttcttaacagtttggatgttagatcggccctgggctctatgtgaccccaagggaattgcaatgtagctggggaattaaagagaatagtaaataaccttgatttaagccgtcagggtaggtgtccctattcccagttggtatagaactacacagctgggagaggctgagttgagattagagtcctggtctctgtgatccccaaagcccatcctctgtccattcaccagcctggaacactgaagaccacaaagatcatgagcactggatgaactcagatgaaggagaactcgtgggtggtgggggcaaggtagagggtgacatgccagagaggtcttcaggaagcttttttttttttttctttgagatggagtctcactctgttgcccagactggagtgcagtagtgtgatcttggctcactgcaacctctgcctcccaggttcaagtgattctcctccctcagcctcctgagtagctgggattatagtcatgcaccaccacgcctggctaattttttgtatatttagtagagacggggtttcaccatgttggccaggctggtcttgaactcctgacctcaggtaaaccacccgacttggcctcccaaagtgctgggattataggcgagagccaccacgcctggccaatcttcaggaagctttaagcttctagctaggatttaaggaaatgaagaaagagaatattactccaaggagagagaacaatacctgtgaaagatcccagaagcaattggaattggagtccaagaagaaccctaaagcagccagaccccacagggcagggagagcacacggcagtgggctggggtcacctgtggcttcctcgtgcctgtgcaatgctcactggtgtacctgagaactttcctcttgacagcgtaagaggcctcaacctgtcccacaaacttagcttggcagcctgtgtttcctggccaaaggcatccaaggagatgacccaagaccaggacagtgatgccccacccttgttttctaggattttaaaaattgtcttcaaatgttcaattgttcttgaaattctcaaaagaaaatttggcttggaagtaatggtagtggtctttgtgcttcttaaagattcttcaaccaaagtcaggcacagtggctcagcgctttgggaggccaaggcaggaggatcacttgaggccaggatttcaagacaagcctgggcaacatagcaagaccccaaaattttttaaaaattagctgggtgtggtggctcatgcttgcagtctcagctacttgggaggctaaggcaagaggatcacttgagcccaggaggtcgaggctgcagtgagctgactgcaccgttgtgctccagcctaagtgacagagtgagaccccatcttaaataaataaataaataaataatattgtttttctggaaaactgctctttcagctttttctttttttattttttttttattattatactttaagttttagggtacatgtgcacaatgtgcaggttagttacatatgtatacatgtgccatgctggtgcgctgcacccactaactcatcatctagcattaggtatatctcccaatgctatccctcccccctcccccctccccacaacaggccccagtgtgtgatgttcccctccctgggtccatgtgttctcattgttcaactcccacttatgagtgagaacatgtggtgtttggttttctgttcctgtgttagtttgctgaggatgatggcttccagcttcatccacatccctgcaaagaacatgatctcattctttatgtctgtgtagtattccatggtgaatatgtaccacattttctttatccagtctatcattgatgggcatttgggttggttccatgtctttgctagtgtatatagtgctgcaataaacatatgtgtgcatgtgtctttatagcagaatgatttatattcctttggatatatacccagtaatgggattgctgggtcaaatggtatttctggttctagatccttgaggaatcaccacactgtcttccacaatggttgaactaatttacattccacgaacagtgtaaaagcattcctatttctccacagtctcgccagcatctgttgtttcttgactttttaataaacgtcattctgactggtgtaagatggtatctcattgtggtttttattcgcatttctctaatgatcagtgatgatgagctttttttatatgtttgctggctgcattaatgtcttctacctgacttgaaactatactacaaggccacagtaaccaaaacagcatggtactagtaccaaacagacatacagaccaatggaatagaacagaaccgtcacgagtaacaccacagttctagaatcatctgatcttcaaaaaaccggacaaaaacaagcagtggggaaaggattctgcatttaataaatgctgctgggaaaactggctagccatatgcaaaaaactgaaactggaccccttctttacaccttatacaaagattaactcaagatggattaaagacttaaatgtaaaacccaaagccataaaaattctaaaagaaaacctaggcaataccattcaagacataagcatgggcaaagacttcatgatgaaaacaccaaaagcaatagcaacaaaagccaaaattgacaaatgggatctaattaagctaaagagcttctgcacagcaaaagaaagtagcatgagagtgaacaggcaacctacagaatgggagaaaaattttgccatctacccgtctgacaaaggtctaataccaagaatctacaagtaacttaaacaaatttacaagaaaaaaacaaacaaccccatcaaaaagtgggcaaaagatatggttagggccttattctaatgcaatggaaagctgccatggaagggttttaggcagggtagtggccggaccagatttctgtttaaaaaatcactctgggtgctttgttgcaaacattctgcagtggaatcagggagatgcacaaggaggctgatggagcagttcaggtgagagattacagcagcttggaccagggggcagtggaggtggagacaccgactgagttagcatctgttttggaggcagagtcaacacagttacaggttcagaagttaagggaaggaaagaaaattaagaatgactcctggttcaaccagtaccttctgtgtgcaataccctaaatgccctgcccatagtcacccaacacacctaatgcgctggtggcactactggcctctgggctctggggttgctatgaactgaattctccccctcctaaaattcatatgttgaagccctaacttccaatgtgactgtctttggagatagtgtcttcaggaggtgtattagtccattctcatgctactaataaagatatacctaggattgagtaatttataaagggaagaggtttaattgactcatagctcagcatggctggggaggcctcggaaaatttataatcatggcagaaggggaagtaaacatgtccttcttcacatggcagcagcaagaagtgtagagcaaaagaggggaagccccttataaaaccatgctcttcacaagaacagcatggaagtaaacgccctcatgattcaattacctcccacagggtccctccgcaacatgtggtgattatgtgaactgcaattcactatgagatttgggtggggacacagccaaaccatatcaggaggtaattaaggctcaatgaagccaaaagagtgaggtcctaatcccataggatagaagggaggggggtcaccagaaccccaccatgttggctccctgatcttggacttctgatcttggacagttctgaggcttggacttccaggctcagaactgtgaatttctgctgttctgttgttcaagtggtgcagtctatagtattttgttatggtagctgactaagatggggtcctactgccgtgttgaggtttgccctccccttccatcttccatagcatggagtgttgggggccaaggagaggctaattttaatagaatggaagtcccccagaagccaacagccctggcctatactctccaccttgcagaggggaccctctcacccctcctggttctattgccagctggcccatgtgtctacttataagccccatcacttatgcttacaaagcatccaatgttcccaggagtatcttcactacccatcgaaaaaagaaaaagaaaaaactcctatgccaaagaacctggaagaaggtattagtggtatgaaatattctggattaagacagtaactcttgcaactttgagtcatcctataacctgaccctgcacactgtgcaggtggttggaatactgctttgttgttgataaggcaatccataaacttgtgtgtccacatgcataagacacatgagtaaaagacaaaagccaaaacaaccatgtaggagagtacctctgcctcagtcttttttctttttttttttttttttttgagacaaagtctcgctctgttgccaagctggagtgcaatggcatgatcttggctcactgcaacctccacctcctgggttcaagcaattctcctgcctcagcctcctaagtagctgggattacaggtgcccgccgccacacccagctaatttttgtatttttagtagagatggggttttaccatgttggtcaggatggtctcaatctcttgacctcatgatccacccacctcagcctctcaaagtgctgggattacaggcatcagccactgcacctgaccctctgcctcagtctttagacttgaaaaggtggtctcacatcactggccaagctaactcaggccagttcaccatcctggtgcaagatccaaaaacttcctcagtgttttattgtccaggtttcggcacgatgcaaggctttgctgtatctcgctacctgggtctagctttgtcccagctggggatgtggggatgctgcaggatgtctaatgcaggagtgttggcaccctgtccccaggaggggaccccacttttgtccccttctcctccgtgtccttgccagctcctaagagcaaggaccacagttgactcagacatggccttgactgactcagacagacagcaaaaacgaaacatgagctaaaggcaagaacacagccctgggacccaaataaagacacaattagcaagaggaatacaagacctcgtagagggaataccttgtgtgccggggcttgaagatcaaggtggatttctacaggcagaaaattaacctgtgtcccttttctttgggtctgcctggtgaatggaggctgtggtcacttgaacccatcaccttttcagtatttgccaacatgcatgagctgagagccatccactccaggatctcccgtgatgagtctgcccaaagtcctgggcttccctctccacgtgtgcaactgctgtaagccgctctgctacttgaagagccgggtctctctcctgaccagcagacccctcagcagctgtgcaccatcacagcaccagccccctccccattgtcactgccaagctctccctgagggcttgcctggagccacactgcacctctcaaccctaggtacctgatgtccaagcaggcaactgtaagggaacactgcaaagagagagaaagtggagactccagtctgtccccgacgctgcccaagggaagggacatctggagactggcacagggacatctggagactgacacagactggcccctgcacagagcgccctgagccctacagcttcagagcctcagcatgattctacgaagcagatgcattttcatattcattttaccaggagaaaaccatggttcagagagtcagcataaatccccaaagaggccacacagccataacacgtccaagttgatgtttggctccaagctcctcatggttttcaggcacccagtgaggaatgtacaccctgacattcactcatgcatgtgcaccgagcacccgcgtcagctagtggggctgcacggagggctgtgccctgtcgcgctccatcctgctctcgccctcagaagctagggtgaaccaagagtgcgactgtgattggaagaagcatttgggcatgactactgctacaatgatattacacacacctatgtaggacgacgtcacagtgtcacctgtgctggggaagcatagggaacacactgtgtgttcatcacagtcacagggtggctgcctcttctgtgcactttctcctcgaacccagaccatctcccaccctcatcacagatttcagaccctgaccacccctctggccccaggtagggtgatcaaccacccagcttgcccaggactaagggggttcccaggatacaagctttcagtgttaaaacccagaaagccctggcaaaccaggacaagtttgacaatgctaaaggcaccatattggagaagcccacagtcctagcccaggggcctcatccaggacagaataagagttgcctcaccctgcagatctccacttctgcctgcagcttaccagcaatggccaatgcctcatccttagggccaagcatgctctactgagctacttttcagcttcatgggatttctcagcctcccccacaagcctttcctttttggtttttggggctttttttgctttttggttttgggggtttgttgggtttttgttttgtcttttgtttttttggttttttggttttttggtgttttttttccttgagacagggtctcactctgttacccaggctggagtgcagtggcacaattgtagctcactgcagcctcgaactcctgggctcaggaaatcctcccaccttggcccctcgagtagctgagactacaggagtacactaccataatcggctaatttcttagctttttatagggatggggtctcgctatgttgcccaggctggtcttgaactcctaggctcaaacaatccttccactttggcctcccaaagtgctggaattacaggcatgagccacggcatctggcccaccctttatttaattcaattcaaacactcaatcggctactggatgaccagttaataaagtagatccaaatgttaggttgttcccttaatctgacactgtggcagctagtccccaggttcttgcattcaccatttttctattaataagaaaactttttctctgcctggcaagaatgcgaaagcaagttaaaacctgctaggaaacagaggcccacccataggatggcacgagagaccaagtgagttctaagagatgtattcttatccgagagcccaaagacaagaagcagacacagccacaagctcccaggtacccagcatccttgactttgcattttgactcacagacctacgaacgtccaagacaaagcaggagggtggatcccacagggcataggttctgctcagggtgaccatagcagctggctcagctgccctccctcagcgggggtctcaggaaacactcttgccctaccagcctcctcccagagaagccacggctgtctctgcccttgcagccactgccagccaggaagacaagttctgggcagagagtgagctggaccctagggaaatgaccctagggagattgaggcttcattcctttccaaagggtccagggatgccctatgacaacgtgttcctgctgtaggttatcaatcctagggcacaggttgcccagaggagagaaacagggtccagggaatgttgttttcaaagaaaagatcatgacattgcaaactcatgtttcagcaagggcagcttgcagaatacttagatcagctaaccaccgtcctctctcttgaaccccttctctgtccacggggaggcaatgcccccacgttgctgtttaacattaatgtttaacattagcatcttactgttaatagcagtaagaaatttctgggccaggcacagtagttcatggctagtaatcccagcactttgggaagccaaggtgggaagattgcttgaggccaggagttcgagactagccagggcaacacagccagaccctgtctctacaaaaattaaattaaatttaaaattagccaggcatggtggcacgcacctgtagtcccagctacttgggaggctgaggtgggagaatcacttgagcacaggagtttgaggctgctgtgagccatgatcatacattgcactccagcctgaacaacagagcgagacgctgtctcaaaaaaaaaaatttaaaagaaaaatttctggcccaataacttgatcatctgtgtacatcaagtatgttcacagggttcaaggattcaaggacagaggcaggaatagatgacatggatgcttcctcccagtctctatccctctgaacttctaagccaggaaacaaaaggtgagatgcccacaggaatcaggcaggcaacataaatgcatgatgttagttacatgtaacagtgcaaatcaaagatctgcagtgacagccaatcagcacaggcctgggaagggtgtgtggagagatagttatgactgcaaattaacagcatagccacatctaaaaggagtagcctgacttcacacctctcaattgcggtcaagaagaaacgcccaggtttttctaagagatgcccagaatttggatgtttatgtgcaatcttctgactttgaaatgctggcatttaattcaggttttgttaaaactctaaatagatcccaaaacccacctgggcctgaagacagcctatgtgtcgtctgtctgcagcctctcctcgaaatgtttcactagcacccagagaaagctgacctggctgcaggggccccgggcaggctcaccgctgtcacatcccgggagattccctgcagggaccagggctccccttctgccaggaaagtggcctatacacatgcagcacaagccagtggagatgggcgtggggcccccacttggtggccctgctgtcaccccaattgaaataggtgttcgaacaaattaaactccacaccaaagttctgtttccctgtcgagtcagcacccagttccaaatgtctatgattaacacaactcttaatgtatctttctaaatgtgaaaccattttgtgtgcaaatattgcaggaacaagaattccttggtccagcgagctcgaggcttcctctactggttagaggccctgagatgaaattaccctgaatgcaatcctcttctcctattctttttatcttgagttccaaatgaaatacattgggaaaataagatgtgctgccagcttctgggccaggggcctgaattcttgcaaacaggcatttggctgagggggcatggagcaacccagtctgcctgtaaatggtttgctttggaagaaatggctttaatttactgcaaagtttagggtggccctgcaggtatggggtgctggccccccaaggtgtccaggaagggatggggcagcaaggtgatgtcaagtacaacctcccagctctgcagcaactcaggaccatgagttaatgacagagaagtgtggagagcctcctcccatgtgccctggagcctcagctgctgcagagcctacacagaggtcctggcattccgactaatcgggcattcttcccagttctgctgccagcttgcccggtcagagctgaggccacagaggacccagtattgtcaccagaggcaccctgccccaactctgagtctcttctctctgactctggagctgagccagcgtcttgagcccatgacctgtgcagtactcaggccccacattcctaaatccaggccctgccctggatttagatgctccgctgtcctgtcttgaaattcctaattcattttttaatgaggaactttgtgttttcatttttattttaccctgggacctgccatggcttggagaaatcacactctgattgccatactgctgtggggctcaggtctcgaggcagcgcctcaccccaggagacaccgggggaaggtgagctgacttggagccaccttcccggctgaggaagctgtatggtttgaatgtcccctccaaaactcaagttgaaccttaatcccaaatgcaacagtattgagaggtgaggcttttaagaggtgactggatcctgagggttctgcctttatgaatggataaaagggctactggattaatgcaaggggaactggtggctttagaagaagggagacctgagcatagcacatttgacacactcagcccctcaccatgggacactctgtgccacctgaagactctgctgagagtccccaccagcaagaaggctctcaccagatgcagcccttcaaccttggacttctcatcctctagaactgtaagagacaattcccttttctttataaattacccagttattctgttctaagcaaccaaagacagatcaatacagaaacctcatctcaagctgttcatgcatggctgcagagaactcatcgagggcctagctggagccagaaatgcagggagagcccagagcctgcaaggagggagaaaggcactctccagcacaggcagacacagagctgaaagagcggagtagccaggggctgggtgccatgggcttcctggaggaggaggctcccagatctaggacagaactgaacaagtaaacagggtttggagaagccagggaggctggggtgggggggccagggggtgggcagggaagcaaaaggagaatcagcagggtggagggccctagattgtgccagacaggggccactccagctgctgcaggagtgacttcactcaccctcccggggttatgcacctgccacctcccagacatccccagccccgcatctccctgcacaatgcctgctctgattctccttgcagccagggtgagaggcagtcagcgaacaatgctatctgcacgtggtggcgcccaaaatacggctgtcatttatttcgttatatgaaattagagcacgccttgtagccataatgaatcatttccttcctgcctgggccacggtgtcaggcaggagctcggcatcccccattcagggcctttcacttcatcgcaggctaataataacccacgcgggtgaacacacatcttcccgagacaatggagggcctggatgggcattggggtcatgagtgcagtgcccacagcaggaggggagaagggccgggatggggcctgggctggacactgtggctgaaggaagacagtgcccatggggaggggaaggaaggcatctgggtgggcaccccaagtgggagctggggcacccaggtcccttttctagctgatcccctcaacaaggacaggaaatagctccctcccccaacccccagctattctaccaggattttttcccaatcatgcctaggtccagctcagaggccctaaccagagccctccacagctggcctcactcttcactcagcccccaattttcaaagcactggctccttccacagcttcatcccagccccatcctggcctggggatcccaggagccaccccctgcagcactgtctcacctcacatccctgcctcatgcaggctctgcagtagcaggtgctcagcaaatggatgagtgtgtcctgatggagccaagtccccgggtagctcccgctggggctatgacctgggagcttcatccggccctggacagcagatgcagacccaggtcctgccctatagggcccgccccaccccctaggttaaaggcaagtccagaccatgggaaaaccatcctcccagaccctgtgattattgttcgtctcttatcctgagtataacccataaggcattttattttattttattgagacaagctctcaattcatctcccagggtggagagcagtggcacactcaaagctcactgcagcctccaattcctgggctcaggtgatcctcctgcctcagcctccctagtagctgtgactacaggtgctcaccgccaccacacctggctaattttttattattatttatagagacagggtctcactatgctgcccaggctggtctcaaactgctggcctcaagtgatcctcctgcctcggcttcccaaaatactggggttacaggcgtacatgccctgcctcataaggccttttcatcaccatctccccaggagtaagcacactatctgtcagtttttctgaatgaaagaataaatgaatgagggtcaaaggccatatgctaaatggtatggaggaaactccaggatgagagtgaccagagaagggaggctggtcccgggggaggtgagtagagggaatggcaggcacacctggcccaggagcctttgcctttcctcttctggtttcaggcggctatgagcagcattgcctcttccccatggatgcctggtgcgtacaaccccactaaacggcacttgtgcaccttgcagcctccaattcctgggctcaggcgatcctcctgcctcagcctcccaagtagctgtgactcatctctgcaccctagcctactccgtgctgtgtctctgaagaattctgcccattcctgcctcagggcccacttaagaggctgttccctctgcccagaactgctttctccttcccttctcctcctgatccccaccacgcagcccatgtccttctgtggggaagcctcctgactttccatcctactgagtccccaattacatgacctcacagctcccagcacttatcctgcacctgactacacacaccaggcagtgactagttcctgctgggagatcccatcttgtcaatttccctggaaggatcagccccgtagaaggtggccctgtgtctgttttgctcaccactgcccctcttacaccaaccacaataccagatgcacaggatgtcctcattaaatgttttctgattaagaaaatgaattaatcccataacaagaaactcatcaaatcccaaggcagcccactctactttgttaatagcctgtgttgtttgtctttgtgaaccatggacaaaaaaaatgaaaaaaaaaattcattcctattatttaaattcattcctattatttaaacattaaaattaaaatgcagataactgtattaatatttttgtgtatttccatccagttttctatatgaactttttacataattgagatcctatgtaagaagggattttctatcctctttatcctacaatataataagtgcttgtgaataaaataatgtcttttgcagcaacttggatggagctggaggccattattccaagtgaagtcactcaggaatggaaaaccaaatatcacagcttctcagtcataagtggaagttaaactatgaggatgcaaaggcataagaatgatataatgggccagttgcggtggctcacacctgaaatcccagcactttgggaggccaaggcgagtggatcacgaggtcaggagatcaagactatcctggctaacacggtgaaactctgcctctacaaaaaatacaaaaaattagccgggtgtggcgggcacctgtaatcccagctactcgggaggctgaggtaggagaaacgcttgaacccgggaggcagaggttgcagtgagccaagattgcgacactgcactccagcctgggtgacagagtgagactccgtctcaaaaaaaaaaaaaaaaaaaaagatataatggactttggggacttggagcggggaaaggggtaagagataaaagactacacattgggtacagtgtaccctgctggggtgatgggtgtactaaaatcttagaaatcatcactacataacttatctatgcaaccaaaaaccacttgtaccccaaaaactattgaacaaaaaggaagctttaaaaaaagtgtttatgaaagttggcaaaacttaataaatattattttactgtatcatactttattcttttcttaatgattcccctataaaacacttaagtgttttttcagtattttaagcaatattgcaatgaacatctgtgtagaaaatgttcccattttttaaattgtcttcttagattccatttttgacgtggacacattgggtgaaagctgatgaacattttaaatttcttgatagtatttctaacgcactctttcagaaattctgaaccaattcacaatcctatcaacaaagtacaagtgcctagtttatcacaagcctgtcagcactgactttttttttttttttttttttttgagacagggtctcgctctgtcgcccaggctggagtgcagtggcgctatctcggctcactgcaacctcaacctcccaagcttaggtgatcctcccacctcagcctcccgagtagctgggactacacgcatataccaccacaaccacctaatttttgtttattttgtagaaatgaggtctcactatgttgcccgggctggtcttgaactcctgggctcaagcaatccacctgccttggcctcccaaagtgctaggattacaggcatgaggcatcatgcccagccaacttttgatttttaatctttcctgatttgtcagggaaacaaagaagtattacttagtttcacactccttttttgtgtgtttgtgaattacctatatacatgttttcccaacttcattagatagcctattccatcagagagctctgtctgaagagctttaagctgagccatgaaggaagagaagcatattcatagaaacacaaaagaagatggcatttttggcagcaaactttgtcattaaaaggtactttcctggccaggcatggtggctcacacctgtaatctcagcactttgggaggctgagacaggcaatcacctgaggccaggagttcaagaccaacctagccaacgtggtgaaaccccgtctcttaataaaaatacaaaaattagccaggcggtggcaggcacctgtaatcccagctactcgggaggcagcggcacgagaattgcttgaacctgggaggcagacattgcagtgagctgagatcacaccactgcactccagcctgggtggcagagtaagactccaccagaaggaaaagaaaaaaagaaaagaaaagaaaaggagaaacaccctttttgacaatctcttgaacccaggcagcggaggttgcattgagcctagatcatgacactgcactctagcctgggtgacagagcaagactctgtctcaaacaaaacaaaacaaaacaaaacaaagatgcttcctttgataatatacctctccccacattttcctttctttgtcatagacgagcctgacctcacagccatctgacaacaagagagccaggaaacagtcgaccctatggctcctaagtccataggttctgggcaggcaaagccactcagtagaccaagcctcagtatgaaatgacagcctggaagaccctgacttctgttcctgcaggcagtcttccaccttcacatctgcctgggacactgcagaggcatctctcacccatagatggggcactcagtgctgaagcagacgtctgtcccaaagatccagatcccacccctgcacattttggctgaatcacttcccgtcattccaagcagaggaagatccaaaaattctcacctccatagtttgaacagctaatttgctttttgttcttgttgcagtgagtacattgtcacgggcagaaatgctagctcatacaccaaaaggaagaaaatgtaagtaatccctaattctagcctttgttctacatataggtaacagagatcatatttttaaatcattgttcaatatattcgcatgctctgtaagccatggtttaggaggcaggaagattgatgttttaggagaacagatcccaccaaaactggggtttccaaaacacgtgccagagccctggggcatcaccatgggctgttttaacatttttatttttttttttgagatggagtttcactcttgttgcccaggctggagcgcagtggcacaatctcagctcactgcaacctccgcctcccgggtttaagagattctcctgcctcagcctcccgagtagctgggattacaggcgcccgcaacaacgcctggctagttttttgtattttcagtagagacgaggttttgccatgttggcaggctggtctcgaactcctgacctcaggtgatccacctgcctcggcctcccaaagtgctgggattacaggcgtgagccaccgcacccaccctgtttaaactttttgaaagaaaccagcaacaccagtcagacaccacgcaaactattactgttatgtcgtttagacctaactaatgaaatgttaggctttgggggaatttgttttgtgtatacaatgtttccattttttaaattatcttcttagattacatttttgaagtggatacactaagtcaaagtagatgaacattttttaatttcttgatactagttctaaagcactttttcagaaactaagtgctgtgcgggggagaaaaaaaaagctactaagaatgctgtgagaaaaaaaaaaactgcttgagacattaagggacaccatgaactgagaaagttggagaacttctacaccacaacaaggctcagcagtgacttccaaattagatttggaagatcagtagacttaactccaggcttcgttggcgaaaaaatgttctagatttccctcacgatacctggagcatagagttccatccaggcaggaagtggaagaaggaagagcccacctttttttggcccaagggatttgtgggtagaaggaaggcggaggaaggagacacacaggaggcatgtgagtgcccacgctcctctccagatttgaccaagagtaggagacacatgcaccaagtttagggggatgctgaggactcagggagtctcatgcctcatgtttaggaactggaaagaaatgcctttccaggctgtaccactaatctaagaggaagtggccattactgtgcaaattcagcagctctgcatgggtttgcaagtgggatggaaatttactttctcaaactgctctcagtttccatatggcttgaaaagggcaaagaagttctcgaggccccagagagaggaaaggaaggtgaccaagctgaattccagagacctcccataaagttatctgaggcaaggaccaaaagcccaggatccaatggcagcacactgagaaacacggcgtggtctgtgagcaccagcagagacaaaacgaagccagatcagccaaggagcatccacgggtcttgccccaccaggaagttcagactatgtatgtctaggctcagttatgctgcagtaacaagcaaccctgggttccaggtctgtgtgctatccccactctacatccactgaagggtggctggaggttctgcccaatgttgccctcactgagggacacaggagcagcccccatctaaatcataactagtcaccttggcagggggaagggaatcaggagggtcatggaccagcactcaaagacttccacagaaatgtgggtcatcatctcagctcaggcttcactggccaaagtgtgtcacgtggccatgcctaactccacactaatgcaaaagtgcagtcctagcctgtggctagatggaagaagccagaaatattggggagcaacaagtttcagtaaatgtcagcaggtgctagatgggacagtcatgttggaccagccactctgcctcagagaaagcagggattcaaatatttcatcttttcccctttgtcactgagtcctgtgagccccctacccccacacagacagtcatcttcttgaagaaagtccagtgaaaaggacccaagtgcctgccttatattccactttccagattagactaaaatttaggagttttattccccatgggtcttgaagaagacagagcagtttgagaaatgaagaagtcatgtgtttcttacacattgaagtgtagtgttagcaaatttgcaaactcactacacagactttttttacaaaataggatcatactatttatttgcactattttacctgctttgttccattattaatagacagagaatttttttccactaatattcttgaatatttccacagcttcccattgactgtatatgccaggggtctctaagcatgaccttcttgtagggactccggagtcatattcatagcaaaaactcaaatttcattgactcttacacccatgtgctggtgcatatgactcttacacccatatgctgttgccatcatttttaacttattatttaatatttgggtggtttctaattttttatgttaaaaaattatgtcacaatatctggtaaaatgacatatgcatttaccttttgacacagcaatttcacttctaggaatctaacaaaagatataggagcaaaaatgcaaaatgttgaaacacagtgttattcgttgcaacacatttgtgctagcaaaagactggaaacaactcaagtgtctctcaataatgagctagttggataaactatggtatatgcaaaaaaagtagactgctgtgccactttagaaaggaataaaaatctctctatatactgatatggagttacctcccaggtatattattaaacaaaaagcaaggtggaggaaagtgatttttgtatggtttcatttatctaagaaaggaagcaatacacacacacacacacacacacacacacacacagttacttatatttttaaaattaaaaaccaaaccaatactttaaaaaataattgtctgtagattcagaaggaacagaatggagaacaaagggatagaagtgaacatctctgaacattattagtgttattgatttgactttgaacccatgaaatattttacataattttaaacaaaattaggttttttaatcctttccagaaagatgaaacaggcaatactttttcctattcctcccactaaatacaatcaaaaatcctgaacattgtatataaaacaaacataataattctctgaatataaaacagacataagaattttctgaaaaatggaaaaactatggcagagtggttggggacctcaagacccaaggaataacataggagtcagctccttgggttttctttttgcttcatatatgctgaacctacaactgaagaaattagaaatctggaaacaacaatagacacagatgacaaaaacaaaaaacaaaataaaacaaaatgctctctctagccaaaggagcagaaaagaagcagcctagaaagtcagaaaacttttagacagtaaccacactactccagccaaataccacagaaaaaaagccttgtggtcccactccattaaaggcctgatgaagagtctagactctcaccctcgcaaggaaacccaacatccatgctgagctgatgtcagaaaaggccaagtgtggagtctccttccccactggcctccatcccccaacagtatcagtggaggagtagcaggatcatattctctcagatgtcaactgaggcaaagtggggaacctggaggaagattgtatttgtatcagataaaatagaattcagggaaaataaaattcccagatacagagagagacatcgtaataatgataaaagggttaatccatcaagaagacataccaatcctaaatgtgtgtgcaccaaacaaaaaagctgcaaaatgcatgaagccaaaactgatgggaagcacctcccttaccctaccagagtagtagcagaaaaaaaccatctagaccacaagctctaagtaagattcaaagtctcataatataacacaagttcccgtttcaatttaaaaatcactcatgctgtaaaaaggaaggtcacaaactgcataaaaatgacaatcagatgctaacatcaatatgacagaattacgttagaattatctaacaaatattttaaagtagtcataataaaagtgcttgagtgagaaattacaaacacacttgaaacaaatggagtagaaaagagtctcgacaaagaaataaatgacatagagaagagccaaatggaaattttagaactcaaaaatacaataaccaaattttaactcagtgactgagccaaaaagcataatgaaggagacagaagaaaatatcagtgaagtggaagagaaaataatggaaattatccatttgaacaacagagagaaaaaacagactgaaaaaaataacaccacctcagggacctgtgggattacaacaaaaaacataagatttattttatcagagccttgaaatgagaggagaaagaggatgggactgaaaagtactcaaccaaagagtggctgaaaatgtctctgagttattgagacataaatctacagattcaaagagctgagttcacccaaacaagataaatgcaaaaaattccatacaaagacacatcataattaaatttttggaaactaaagacaaatacaaaaacatacaaaaagaaaaaaaagagagagaacatgctagtacatggggaaagcaattagaataacagtagatttctcatcagaaatcatggagaccagcagaagtggcaatgtgtttttcaagtactgaaagaactgcctacccggaatcctatatccagcaaaaacatactttagtaattaagggaaaagcaagacattggccaatgaaggaaaactaagagaagttgtctctagcagacctactctaaaagaatgtctaaagggagttctataaacagaaaggatgtgagaaaaagtcttggaagagaaaaagagagagagaggagaggtaggaaggagaggaggggaggggagggaaggcaggcagacaagaaacaaaaatatgggtaaattaaaaaggctccccttcttttgagttgtccaaattatgtttgatggttgaagtaaaaattataacactttttatgtggttctaaatgtatgcagaaaaatattaaagacaatgacattaaaagtgaggaagataaaaatacttaaagggagataatgtttctatacttcattcaaattgatgagatgacaacagcaggattctgataagttatgtataaataacacaatacctagagcaaccactaaaaaaaattatacaaagagctgactcttaaaaatactacagataaaaatgaattctaaagaaaagttcaagtaacccacaggaagataggaaaataacagagaagcaaaccgcagaacgaaaacaaacaaaaagcaatggctgaattaatatctaacatttcaataattctattaaatgtaaatgtcctaattataccaatttaaaaatatggcagagatggatttaaaaataagacccagctacatgctttctcaaataaactcacttcaaatataacaatataagcaggttcaaagcaaaaggatgggaaagataaatcacacaaacattgatcaaaggaaagcagtacttatattaatatcagataaaatagactttggaacaaagaaaattaccagagtcagagaaagaagatatataatgataaaatggttaatacaccagaaagaagtagcaactctaaatgtctatacaccaaacaaaggagctgaaaacatcacaagcaaaaactgacagagctgaaaggagaagcacacaaatccacagttatacacagttgggtattttaagttccttctctcaacaattagaaaaatcaacaaggccacagaatagttcaacaacactatccaccagcaagaattaatcaacatttataaagtagttcacccaacaacagaagaatacatattcttttcatctgtctatggaatatatataaaaatagattatgccctggtttataaaacaaacctcagcaaatttgaaagaatttaaattatacagagtgtgctctccaaccacaatggaatcaaatggaaataataacagaaagataaccaaaaaatctccaaacacttggaaactaaacaacacacttctaaataatccatgggctgagcaggaagtcttagaagaaataaaagcaaaaatacattgaactgattaaaataaaaatacaacataacagaagtgacagaacacagctaaagcagtgctgagagggaaattcattgtattaagtgtgtacattagaaaagaagaaatttcttagttcaataatctaagctctcacctcgagaacctagaaaagagcaaaataaacccaaagcaagcaaaatgaaggaagtaataaagagtagaaataaacgaaattgaaaacagaaaaaccacagagaaaatcaacaaaacaaaatctttctttggaaggattaataaaattgacaaacttctagcaaaaccagcaaattagaaagagaaaaaaatacaaattaccaatatcaagactaaaagagataatatcaccacaaagcctgctgacatcaaaagaataatagggaaatataatactgtgaacaactttatacatgtaaatttgacaactgaaacaaaatggatcaattccttaaaaacacaagttaccataactcacccaatatgaaaaagataatgtaaatagccctatactgattaagaactatgaatttgtaattttaaagctcccaaaaaggaaatctccaggcccagatggtgtcactgctgaattctatcaaacgtttaaagaagattagcaccattctatacaatcttttccagaaaatacaaaagcagaacacttcttaatttatattatgaagttagtgttacctcgataacaaaagtaaatgactgtgcaaatagaaaaaaaaacaaagctacatgaatatagatgcaaaaatccttcacaaacattagcaaatagaattctgccatatataaaaagagttacacaaaaccacatgtggtttatttcatgaatgcaagacttgttcaatattagaaaatcaaccaatgtaatccaccattttagcaggctcaaaaataaaatcatatgatgatattatttctctgtacaagcagtatacatgtacagacaattacacaatgctgatgaaataaatcaaaataaatggggatatgtaccatgttcatgaaatagaagatttaatataataaagaagtctattctcaaactgatatacaggtttaatgcaattctatcaaaagcccagaatgttttttgtctgtatatatagacaatattgttccaaaatttattttgaaaacaaaggatctagcatagctaaaatggttttggaaagggggaataaaatggaagaaatcagtctacccactatcaagacttactatgttaccatggttatcaaggctgggtggtcctggcaaaggaaaagacatatagatgaagggaacacaaaagagaacacagaaatagacccacacaaaatacccaacaaattttttacaaaggcacaaaagcaacttaatgaaggaaagatagagcctttttaaccaatggtgctggagcaattgtacgtccataggttaaaaaaaaatgaaacttgatctatgtttcacactttataaaataattaactcaaattgatcactggcttaaatgtaaaactctaaaacttctagtagaaaacattggagaaaatcttcagcatctaagactaggcaaagagttcttagacttgacacaaaaagcatgatccctaaatggaaaatttgattaaaatgcacttcaccaaaattaaaaggttttgcttttcaaaagaccatggtaagagagtaaaaagcaagctacacaccaacagaaaatatttgcaatcacgtatctgacaaaggactagtatctagactagagaaaactctaaacactcaacaatttaaaaaatttttaaacaacaattcaactagaaaataggcaaaataaaaaaaacatgaatagacatttcaccacaggggaaatatagatgctaaataaacacaagaaaagttatcatcattagccattagggaaatgcagattaaagccacaatggatattgctacccacatgccaaaatgtcttttgagtgacatcaccaaatgctaatgaggatgcagagaaattagatcacttttacactgttggtaggaaattaaaacggtaagccattctgaaaaacagtttggcaatttcttaaataactaaatatgcaaataccatctaacacaacaattgcaacacctgggcacgtatctcagagaaatgaaaacttaggttcacagaagaacctttacacaaatgcttagctttattcacgatagccaaaaactggaaacaacctagatgtccttcagtgagtgaatcattaggcaaaccgtggtccgtccgtgctatagaatactacgcagcaatgaaaagcaacagcttgaatcatgttcctgagaatgatgcttaggggaaaaagccaatcccaaaaagttacagactatgtgattccatttatttaacattcttgaaatgataaaattatagaaatagagaacagattggtggttgccaggggttaaggagtgatttgggaggaaatagttgtggctataaaagagcaacataagacatcctcctggtgaaggaagttttctgtattctgcctatagcaatgtcaacattctgattctgacagagtactgtagtttggcatggtgttaccattgggggaaactgggtaaagggtacatgggatctctctgtactatttcttacaactgtacatggatttccaattatcacaaaataaaaagattgatttttttaaaataaagatcaaggtaaccaaatagttaacgatgggaaactcctctttaagaactattccggctaatgagttaagaaggggtgatagaatataaccatgttgcagccttaataaaataatagatctagattagattttattccttgagaccaatgggccttctggtcatctgaagagtatggaccccctctaaaaataatgaaatgaagtaaaatgaaatacgtaagttacaaactcttgaagtatgattatcaaaatatttcacaaaaaacaaatttgtgacataacaatagatgtgcatccttatgtacttatcaataacaaattctagtggagggtttaataattttaaagtggagaggagcacaaattatatttcaagatgcctgcaatagctataatgctatatggaaatatctgtgacttctactggtgacatagtcgcaggatatgcaagatacagaggaacatgttaaatggcacaaaaacaatacaatcagcaaaatcaagtctgtgggaaacccaacggtgcaattcatccagccccttcaacaaattccaagggaaaaagagagtgggggaggaaaacagagattaaaagagatgagatgcatcaaccagttgccaagggtggactttatctcattcaaacaaaagaaaaaaagaaagattatgagacaagtaggagaaattaaatatcaactgaatatttgacaatattaaggaatttttgtttattttaaagtgagataaaggtattgtgacttgctttcttaaggagcccttatcttttagagatgccttctgaattattgatggatgaaataatgcgatatctgagacctgcttccaatcacctgggagagaggaggggacccaggagttgacaaccattgaagctgagtaacagggtacaggagtccatttttctgttcatgctacttttacgcaatttttcacttttctataataaaaagccaaaaacaaacctgtaatgagcatcattgtatgtgaatctttgttttcatccaggattaattacctacagacatttcctaatagtggaattgtgggttttaaggatgtgaacatcttaaagtttttgaaatgcattgcttgagtgagctagtggaacagggaaaaatagagtagctcaaggactctcctagcaggaaacaagggaacttaaaaaaaaaaaaaaaaaaaaaaagacatggtctggctctgtcccgcacgctggtgtgcagtggcacaatcatagctcattgcagcctcgaactcctgggctcaagcaatccctcccacctcagcctcctgagtagctgggactacaggcacatgataatttttttttattttttgtagcgacgggatctcactatgttacccaggatggtttcaaactcctggcctcaagtgattcttccacctcagcctcccaaagtgctagggttacaggcatgagccaggaatgtttctagaggtaaggcttgtcttcctccaccctacctctcctcctctttgcccagatgtacccttcctctatggaagaaaccaaattttagccagcactcaaatcctggttctcactattcaaatttctctgtctctggcacccatctgctggatgtaaaatcatgtattcacctaattttggtggtgggatatctgcattttgtctgtttctttcttttatacaagatgttgtaacaacacatctgtagtaaattgctgcggtcatttattattacgtccttgggataaattcctagaagaatctacccaggtcaaaagaaagtgtattttgccctcctagaaactgtttctggttaatcccatcagtgcccagtggctggttcctggcttttaccaggtaccatcaaatttacctgcttaagaccttcagccagagatgggtcaaatttacaaacaaacatcagccaatttggtgggttaaaataaggtcaccttggggcaggcacagtggctcacggctgtaatcccaacaccttgggaggccaaggtgggaggatcgcttgaggccaagagttcaagactgacctgggcaacatggagagacccctctctacaaaagaaacttttaaaacttagttaggtatggaggcacgttcctgtagtcccagctactcaggaggctgagatgggaggatcacttaagcccaggaggttgaggctgcagtgagctttgatgatcactattacacttcagcccctctgtctcttaaaaaaaattttaaataaggtcatcttgctgctaacatgagcatctttttattactagggggttgaatgctgtaatctggtcaactgtcaggagcaagtttaattccttggactcccttggaaaatgagatctggcattaaactttcttagaagaacgggtgttcagcttccaacatgccccacagccaaagctcaggctctccccgagccatgattctcagtgtgaccagaagatgctggcatcagaaccacctgcagagatggcctcttggcaaattccagttcacaggcccatcccagacctacagaatcagagtctctgggagcagagactgggcatccctgtggaattccactaagacccctgacctagagagagctgtgccagttcctcatctttcaaaactgagctggattattcacaatagccaagatttggaatcaacctaagtgtttatcaacagatgaatggaaaaagaaatgtggcacatatatacaatgaaatactattcagccttaaacaaaagatagaaatccagcactttgggaggccgaggcgggcagattacctgaggtcaggagttcaagaccagcctggccaacatggcgaaaccacatctttactaaaaatacaaaaattagccaggagtggtggtgggcacctgtaatcccagctacttgggaggctgaggcaggagaatctcttgaacctgggaggcagaggctgcagtgagccgagatcaagccactgtactccagcctgggtgacagagagagagtccatctcaaaaaaaaaaaaaaaaaaagatagaaatgttgtcatttgcaacaacacatgtgaacttgaaagacgctatgttaagtgaaataaaccaggtacagaaagacaaatatggcatgatgtcacttataggtggaatctaaacaagtagaactcatagaagcagagagtagaatggtggttaccagaggctgggaagatggaaaattagaaagatgttggtcaaaggatataaaatctcagataggaagaatcagttcaagagatctattgggcatcatggtggtgactatagttaataataatatattgaatacttgaaaatcactaagagagtagattttaagtgttctcaccacaaaaaaaaagtactaaatgcataaggtaatgcatatgctaattagcttgatgtagtcattccacaatgtatgcgtatatcagaacatcatgttgtgcaccatacagatatacaatttgtatttatcaatttttttttaaactggtctggtcagcagttgaaattctttcttaggaggcaccagaaacgcctgctgaatgaaccaatgatgaatgaatgaataaatgaaggaaggaagaaaggaataaattgcttaattaactgaccaatgaattcatgaatgaacagatgagcaaacgtgtcaataaatgaaaagacgagtgagtgggtgggttaataagtgagtgcctatgtgcagaaaaggagtgttggtatctggctttttatagataccatcaaatttacaaacaaacatcagccaatttggtgggttaaaataatgtcaccttggtcccggcatggtggctcacgcctgtaatcccagcactttggaaggccgaggcaggaggatcacatgagtccaagagttcgagactgacctgggcaacatagagagaccccctctctaccaaaaaaaaaaaaatttaaacttagccaggtggggaattgggggacacagcagagaaggaagcctgccagcctgctttgctgtccttctgccacccaggttgcacacagccttaggaggaagagacacaatcaacttcccacacccacctcccaggacagcgcatcccaggacaggagcaccgaactgcccccatgatgacctccccagacagaaaataacagattttatgctttctacacattttttcaaagaatttttatatgtgccctctacctacaaacaaaataattatttgtgggaagaggaagcctttcagcatctgaaagaaaaccacacaagctgctgggtaaatgaacacttgccttctgagtaagcagaatgtgttttggaaatctccagcagtgaccagggatgtgcacagcttgagaagtggaagctcttttttccctcttcgcctctctctccttcctccccttcccaccttttctttcttatcctctcttctgctctcaaatccttttcctaagaaggggtagggtcccaaggagcagtggagaaaaagaaagcagctcaccacacccctgcactctgcaccggctggtgtctctgcctcggtcctaccagtcacataatttgcaggaacaatccctgcactgccttgcaccactgcccctctctaccagtccttgcccataggtcagaggaacaagagtggtccacaggtgctgcacaaagacctccgttctgaggtctgtactatctggctcaagctgtgctcaaactttgtccccagcttcttgggagatccacaggcaactggggttagacaagacctctaattcagaactcaagcctcagctgctggagacaatgtactttcacaagtcaggggatgggccaccagccaggggcacagatgggacacattgctatactggagtgatgcttcatctttgcaacaggacacacccaaccctaggctaggggagaattttctccagaggaaacccaggaattactaattatcattacttgtttttatactttttttttttttttctgagacagagtctcgctctgtcacccaggctggagtgcaatggcgagatctccactcactgcaagctccgcctcccgggttcacgccattcacctgcctcagcctcccaagtagctgggactacaggcacctgccaccacgcccggctaattttttgtatttttagtagagatggggtttcttcgtgttagccaggatggtctcgatctcctgacctcatgatccgcccacctcagcctcccaaagtcctgggattagaggcgtgagtcactgcgcccggcctctacaatattattgtaaatagatgacccaaaatgtgggcaggtttttccaaggggtttctgctctgacagccttctagaatacccctcccagcctggccacacacctggggcctctgaaccctggcaaggcagggaatgttcaggactgggaactctgttgattttatttctattttaatagtctgagcattgccacctttgtatattacattttctaattttgtaattctatggctaagaaactgtggttacacctgtggctgtccccatggcagaaggcaagccagggcggcaaagatacagactttcccccttcaggccccagcctgcagctcgcatctcagctaaattgccactggttcccggcctctctctgtcttccagccagtcctgtttcttcaccttcacggaacacgatcgggccgggtttctcttctctccaatgttacttcaacttctcgtcataaaatggaatgattccagtgtttatgctgttagctacatttatctttaagagcaagatgttgagtttagctttaatgatgaaaaaagcctttcaaaggataactcattgaaactcattatgcactataaggccactatttaaagattcggtaattccagtgatgatctttttaaagcagatttatagcagaaaatagttacattctttgacttcagttataattttctattttgtaatttaatactcctttagtttatatttgcacattaaaaatatagcatctaaaagtccatcattaaatacttttaataagtgcaataaataagttttacagtgtgcataaatctaaaaacaaaacccaacataaattgttaatcttacactttttctcattaattgcaatacataaacatatgttttatacaaagatatttgctacgaaataagtataataaatacagtttaccacatgtattaatcttaatagttacaaactgttaatcttatatattaggtaataatttgcaataaataattgtttattatcttgatgtttgcttgtcttgggttctagcaatatgcaataaagaaatgcaattttgaataatttgattgtaagactgctgggaaaatactgtatgttataattagctgggagaggattctagtcacaaaagcaagcatggagacagggttcaataacccaaacatacgttattgagtccataaataattttaaaagttaagttcagtttcaaacaaaacagaattttttaaccttaaatgcaattaaagaaacatttcacattctttagtgctttcattattatacattcaaaaggagatgaagaaagctggaagccccatcaaaactgccagcctccaagctgagacgggaacatggctgcctttgggagaaagagtggcctgacagctcatgcccatcagccaagggctccccttggcctggaatacaccctccggaacagccagcaggtgcacccacaaacgcagcaccctccatacctcaccttcaagctggcacttgctgaactgcacacacatttttctaagagaggttgtcacctatactgagcttaatagaaattgttaatcttatatgtaaaggtaataatttgtcataaataattgttcattatctgggcctttgcttgtcttggagttgagctgtatgcaataaagcagtgcaattttgagtaattcgattgtaaggctgctggggaaacatggtggattgtaatgagcctaggaagggtcccgtgggccagagaccccaaagaaccaacctaccagctctggcacatgcaaagcccaggtcctcaccagcaattgcacaggttctttaaatagtctctccaagacagagagtgaaccagtttccccttctcatgtttctgccagagtaaacatcacttagaggaaaccagtcctagacgaagtgaacctcggtccctgggaaaggctgaggtggccccagggcaatttagtcccaccaagccggctgattggcaccaaaggctcacctgtctgcctggaacaggtagggccagggggtcacttcctccaaagtgaccctgacactgctcccggcagcagcagcatcctggcacatccctgcaggcagagagctagagcagtcctggctaagaggtggctgtgaggccagggagcaaggaccctgtgcactttggcttcctagaatcccacgggcacaaagacccacttcaaggaaacctcccccaagctgggaaaggaagggagggagggtgggaaggaagaagggagggaaggaaaaagagaaggaaataaagaagaagggaaggaggaggagaaagacagaggaagaatgaattttaaaaaaagagaaagaaagagaaaagaggaggagaaagggagggaaagagagaggaagaatgaatgaaaaaaagagaaagaaagtgagaaagagagaaaagagggggaggaagggagagaagagagaaagaaagcaaggaaggagggagggaggaaggatggaggaaaacagaaagaagagcaagggaggagagagggaaggaagaagggaagaaaaaagagagaaaaaggaaagaaggaaggaggaagggattaaaggagggtagaaggaaggatagagggaaggagggagggaagcgggaaggaaggagaaaaaaagggagaggaagaaagagaggatggaaggaaggaaggaaaaagaaagaaagaagggagaatcctagatccattataaccatgaacagctcttcctaatataaagatgatcagcaccccacaaaaacacacacatacatgccctgacgtgcatccaatgacatgagtctccatatcaaagcccacttgcagtgtgttcctggcagtcgctgcggtttgtggttttaatatctcgcttcttctacgctcctggcacctgctagagtgggcctggcttcccctctttaggcacagctcacaccgggagggtaagcccccagcctgctctctgcctaggctgggcacggcacagtccacagcctgggagggagccgttcatcagggtgacataacggttcagttccagaagaaagttcctgcctagggctgagcttcaggcagggtaggttcccaggagcaagtgctgtgagcctgaggccccaggcgtctgaagacaccacaggtctccccctcgtctcctccatcccagcaagcacctgcggtccaatcgcgctaagccaggggccctgctttcagccgggttggaaagggatagaagctcccccatctcctgcccttttctaaagacaggcagctccagcaaaaccctcagccctcaggcgtccctttcgtggggtccccgcccctgttctggaaatgagaccccaggtcccaggatgcagctggcatcgcaggggaagggacttgcccccaccctccacccgctaccatgacccgggagaggccttcccgagggtctgaaggtccgcagagccctgccccaccctagtccaacaaggggaccgcgttttagggacatccctggattgtcaagaaacgctggctcatccggacccccggggagcgcagcatgaacccaggagcaccctgacaccccgaaaacagggaacctggggcccttctcaaactcaaggggaaggaaagggagcctgccaagttctgcttctgcgaggcagctgccaccaaaacccgctccgagggccccgccgggccgccctggcagctggaaaagcgcattcctgctcgcccgaggatgcagaaggcaaccgagtccccgggcggcggcggggcaactgcggaaatcacgcagccagatgaagctcataaatttcccctatgaacaattgttttcatttccctcccatgccactagatattataagtggaaagcaaaacacaagtaaatatgttcattccgctcttgcgatcggtgataaaccggaggcggccgaggccgacagaggtcagcaggccgctcgccacgggtctgcgagcggacactgccaccctccggccgcgcgcgggactgcaccggccccaccgcccggctctcccgcccgctcgctgcccgccaatgttcgctttgcgcccttcgctcaatgtgcgtgcaaattacagggacattcgaaaggacagagagctcccatatttaaaataatcatttttgttcatcataacctctcttccagagataaccgctcttattaacgttttcgtacaattatctccagtctttatgtgcattctacgatgtcttctgtgtacctatgaaatacaaagcttttcctacaatattaaaccttgatttcctaggtatcacttaaacgaaagttattgtcacacaagatagcctcacagatatctttttaggggctgtgtaatatttcaacttgggactgcaccaaaagttactgaaccatctcccaattgctcatttaaagagtttctaatgttttcatccttgtgcataatgctataactgaaacctctattcagaaacttttgtttatattgttaagatccatcaataaaggcagaattattaaatgaaaagaaattaactttttttttaatggattctggctccatgccccaggctggagtgcagtggagcaatctcggctcactgcaacattcgcctccctggctcaagcaattcccctgcctcagccccctcagtagctgggactacaggcacgcaccaccacacccgactaatttttgtattgttagtagagacggggtttcactgtgttagccaggttggtctcgaactcctgacctcaggtgatctgcccatctcagtctcccaaagtgctcggattacaggtgtgagccactgcgcccagctgagaattaacatttttaaagctcttagtagcattactattttctagatgtataatacctatgtggagaatattatttaaaatgatgagtgaatataaaatagtgctcaaatgagtggtcagaaaaactgtatcaccaacatatcagtccccactcatctcatctttcacttgaatgcaaggccaataaaaattccatcaaagcttttttgatattttgtcacattgattccaaattccatgtgaaagagtaaataaggaaaaatctccaaaaaacatgtttgtgaaaaaagagaggagacttcctcaacaaagatattaacatatatcacagaaagctacaataatttaaacagtgaagcacaaaatagagagcacaaaagggagcaaataggcaataacttacattttaacataaagccattttatatcagtgggaaaaggatggctgattgatgaagttataggtacaatctgccactcattcagaaaacaagaaaagttagtgtcctacctcataccacatattcaaatgaatgctataaggattaaagatttaaatttttaagtgaaactataaaagtgatatttacatatatggtaatagagaagttctaagtccaattgcaaaggcagaagctaaaaactttaaaatgcccagatttgaggtgcacaaatttaaaatacccacatgtgaaaaatataattttgaaattgaaaggtaaaccaacactaggagaaaaaaacactttcaatatacataacagaaagaaggttaatgccccaggtgtgtagagctttctcacaaatgaagaacagacaaatacttcaatagaattggggacatgaatagcaattcaccaaaagaaatacaaatgatagacatataaaagatgtttagtcttattaataatcaaaagacatgcaaattaaaacaaaaatgagaaaattttgtccctatattgataaacacaaaaacaatgattgtattgtcaaggatggataaacgaatcctttcaacaccacaggtgatagggtaaatcaggtaactggtaaactttataaagggtaatttcacaatatgatcaaaattcttacaacacgtgacccaaagattctacttccaaaggaatctatcatgggtatgtacaaagattcacctgtaagattgttcattgctatcagaaacaaaccaaatgtccaacaataggcaaccagattttacatagattatataatatcataagataatacaatcaagtcctcaatagtaatgttgtagaaattaacatttaaggatgtcttaacatttaatattcaagaaggtctcataaaatactgctttatagcaaaaagcaagttacattgtaaccatgctttctacacacataggaaaaaaaaacctataaggtattcctttaaataataataatggcaggtggactacaagtaatttttaatattcttttggctgctttaatattcttttttctttatatatttaacaattttttatcaattgtttagaagaaaaatagttttagtggttttctagaaatattgtattttacgttcccaccagcattacttgagagtgtttgttcaggccaggcaaagggggctcatgcctgtaatcccagcactgtgggaggccaaagcgggaggatcacatgaggccaggagttcgagaccagcctccattctaccaaaaaaaaagtaaagaaaaaaaaagacaatgctcattcatttgctcattttttaaatccaatactctcaaaacacacattcagagcaaagcacgttcaagcctggcaacagctgtaaacaagacaaagccctgcccttgtagagcagtcgataagctccacggttaggaaaactgaaaaggaacaaaccaagaaagcagccccgtggggatgttccatggcctgctgtggagggaagcagggcgagggtcaccgaccggctggggaaggagctatgctagggaggggttccgggagggccactcagaggaggtgacggtgaggagacctgagtgtggtgagcagcgagtcacctgtgaatctgggacaagcatttccccgcagagggaacagccgaggcgaaggcccgaggaggggaggggcttggtgtgcctgcggaacagttgcgcggagccccgtgtggctgaaaaggagaaggcgaaggagaggcgtaggggaggggacaggtggcaagagcccagagaaccttctggggcacaggagggagtgtggattttcttttgtgtatgatgggagccgttggagactttgtgcgtgagagcgacgagacctgatttcattttcccaggatatcgccagctcccggttgagaatggaacccagtgtgccagaactgcagcagggaggccgattcaggaggtcactgcacgagctgtgcctggcctggagtggcctggtgcggggaacctggcggcactggcggttcacacttgctaactgagtaagcaaccgtcgtgggggtggaatcttgatgtgtttcttttctgagccccttgtcagctggaatgctctggtagctcatccctcaggagatctggatgtccctgaaaatagagaatcaggctaaggggattgccctcaggatacaccaccccccattctccccagcccagaaatcatcttgtgcattggccttgagtccaaccaaaacgctggacagtcagtggctaaacaaagaaagaagagcgttctgttgaatcatgatcgtcatctacactttcaggagctttcatgtccaccttcacaggtgtcagcatagaaatcacacttctcccaaaaatgcacatgcaaagttttcctgcatccaatgcaccatgtcatggaaggaagcacaaaatctatgtggtcttacacatttttttcagggtttggagattaactaatagatttccaggatttatttcctcctgggttctaatgtcatcccactatatttatatgggaggaaaatgatgtctttcctcctcaatcattttaaagtcattatcatctcttgcatgataaaaattaatcaaactattttcttaagataattcttataaaattgaggtgcctattacaggcctgcacatcttatgtcccagaaattacactcatctttgcctctcctgtttccatagtcccatttcttccagtattaactatttttttctttaatgagacagggtctttgtctgttgcccaggctggagtgcagtgatgtgattgatcacagctcactacagcctcgaccttctgggctcaagccatcctcctgccttagcctcccaagtacctgggatcacaggtgcatgccaccacacctagctacattttttttatttttattttttgtagagaagggggtctcattacgttgcctaggctggtctcaaacactcaagtgatccttccatcttggcctcccaaagtgccgggattacaggcgtgagccacgctacccagcccataatcccattttaccatgcacttggtccccagtttctcaagagatctgtgtctgcccttgcccagtccctcccttggggaagttgcttctttgtagccagaaaaagcccttggggtggtggaggatggaggaactgtgggctgggccctgaggacacagtccgaggcaggtcctgtgccatctgggggctgagacactggggtcaaatatgtcagaggtaaattcgcaacttccattatccttgcccaaacctggagggggctgctctgtgtgcaccagggggaccataggctcaggatggggctcttctgtgcaaggcaatttggggattcagccggtgtcctaatgcctggggtgccacctggatgaatgaatacaaaggcaccagaggaggaggtacttgtgtggatagaggtatctgggactccaggtgggggtcactgaactgaaaacccatctgtcccaagtaaggcatgtgataagagaagggcatctccaaaagaataccttgggcacggtgctactgcaaaagctaactcaagactccccccgcccctagtattggcatggaaaagtctccatgccagcaagtgatacccagcacggaccaaggacatcttagtaccagcagtctctgacacacatgccagaccaccaaggtatcacaactggccacagcccatcccagagacagccgcaccacagcaaggcagccacagcataaagtcggaaggtccttccaccccgactgctgcaacaaaggcacttgcttacaggaagcagtgagaacatacatggttacacatacggacacgcacatcggtgagcatctctcctctggacttgaatgcctctgctctgcgctggcactcagcgtgatacctggcacttggtaggcacttaatgagtgttttctaaatataggaaggaacagggggaatggaaggactgtgtagacatcgtccagtggcttgtttctctaccagtttcatatccagaaagcagcatggcatttcagggtggcgctcaggccatgctgtcagtttcataccgagcatcagctgtgggggaaaagaaggacacgcatgcccagggggctgggtggttttacctccgttaaaaaaaatcaccttccaagagacactccccaagttctgccgaggaaggacacagcacaggggatccacctgccttcaaggcgaccaaaggagcagatgccagcaggcttgaagcagagcccttggcaggcaggtaaagttggacaaaccctggtctctgttgccccatctgtaagatggcactaattacctaagcttgtccccagactctaatgacataatgagcatgaaagcccctcattaggggggcgaaaggcatcgttatcccatgtttaaaggacgtcatttgccactgggcagagcagaggaagaggaacaggaaggagccagaagcctgatgctcttggcccatcgcctatcagcatcacatctgagcctgggatctccagccctgggctcctgcctctcctcacgggacccagagctgcctggagggcaagaccccagtgagtgctcagagcaaaggagccactgaagacactcagactggcagccctatgtgtaagggtgtgactgccttttacccggtgcaaggagcaaggacatggtgggtggaaagtgggcagtgaggcctctccatttcaaaaggcttcccccagtggccggaacggaaccccatggagggcctctccatgctcttcatcagagagcagacatctccaccaccaccagacatagaaatcgtctccaacaaaagctgctcaattccctccatctcggaacagagtggcaaaggcatgagagttgctacacattcggaggtagacaagcacatctaataaacacagagacaatctgcccatttttggacccctgcattagattcccaagcagatgctccaccacactcaggctgcaagattagtgtgggagggactggaggaagggctcagacacccagacccgctctctccccaccaggctgcgcgtctaggaattgtctgtgtcacgttgctgctgtcaccaagggagggcccacggggatgagatcctgccccaaaagcaagccctgcctatgttaaagacagagcctgcatgagtcaaatccgactcctgcatcccatggtctgtttgggaggctgccctgtccccaccaagggtgccttctcagtcaccttcaccgcactcaggcttaccctagcacactttaaaccaggaacgctctcccttgagctatctttttttttttttttttttgagatagagtctcgctctgtcacccagactggagtgcagtggcacgatctcggctcacttcaagctccgcctcctgggttcacaccattctcctgcctcagcctcctgagtagctgggactacaggctcccgtcaccacgcccggctaattttttgtatttttagtagagacggggtttcaccgtgttagccaggatggtctcaatctcctgacctcatgatccgcctgcctcagcctcccaaagtgctcggctcttgagctatcttttaagggacctgaggatgaaacagtgaaactggagactggcaggtgttcactgtcagtctggggaaagcagatccaagcagccatgagaaaaccccggaagcagtcagagaggaatcaaagtcctaccggtgtcatgtggccccaacagagccccggagagagccaactgagcagaggcctgtgtggctgggcaggcaggggacatgtcctggagggagcaagccttgaacttgtggtctgtagaacttgcccttctgacccaagggtggccgtagaggaatgttaaatcagcacccccagccctggaccacgcctgatggcctggaggagtctgcttaacctctccaagctgccccttggagaatataagatcacgaacctggacctcgtcccacccaggagacgccatgaggaacacagtccccacagttcacaggaagttgcagaccggaggtgaaagagcattttgctggaaggtaatgaggtatgttaaccaccctgaaagttaggggattcacccagcctccagttctagacagctctcacctcacattgagcaccaaaaaactcaacaatcaaggtaagtgcaatctctttaaaaatcacaatgaatgcatttttcaaaatccataatgagcaagattatcaaaattttaaatcaagacaagctgtgaccttgctacctcactcagcacgacctggccatttcacactctcataggacagagtactccatcctcatttcactcaccaccattgtcattaaatattcatcggagggatggttggattcgtttttgcccctgcaagggcgagggtggcatgcttcactagtctgtgtacctggcacctagctcagagcttggcacatggaaaagtggtgcccaggaaatacccaaatgaacatcgtagatggaagttaatcctgaatgctgtgctgagagctcttctctgctcagatgccacggcgggcttctgctcctagccctgggggactctccacccgaccctatcgctgccactgtacaagctcctaccttcccaaatgtagaagccagatctgggtgtgtgtgtgtttgtttgtttgtttgtttgtttgtttgtttgtttttgagacagggtttcattcctgtcgtccaggctggaatacagtggcacaatctcggctcactacaacctctgcctcctgggttcaagccattctcctgcctcagcctctcctgctcaagccagctgggattatacgtgcccaccaccatgtcctggctaaattttgtatttttagtagtagagatggggtttcgccatgttggctaggctggtctcaaactcctggccttaagtgatccatctgccttggcctcccaaagggctagaattacaggcgtgagccactgcacctggcccagacctgggttctaatgacccctttgctttcatttgtgaaaagatactttcagtgcagagctgatgggatgcagtgcagacacaaacaatccggcaggtcccaggacaatgtgtgactgattttctgcacctcctggacttgtctccacctcacacaagggccaccgccaaatggctgtgggagggtgtgtcctgccgttttgggcacttgggcggctgggcttccgcccccaggagccatgttggatccattccaagacagtcactctctgtccacttcttcacagagaacatctctatattgaggaagtttaatttgaggccagcaggaatcatagtgtatgggtttgcctgaaacaggctcacatgcaggcaatggctaaataaaaatctccaaatagccatgccctatttttgcatttttatgagttctttgaaaggaaaaaagaaggggtgaggaagaaattaagaaatacaaggctgagcacagtggctaacgcctgtcatctcagagcattgggaggatggtggggaggatggcttgaggccaggagttcaagatcagcctgggtaacatagtgagaccccatctttagaaaataaaaagaaaaataaaatctttacagaaagaactacaagatgtttccctgtccttacctgatctcccagttgcagggcacctaggaagggaggggaaagtgcagggggcctcctgcatgggcagccaggtcatgggtcctgccaacagcctctgcccagctcctcttctataagtggaccttggccctgtcctccgtatgcacctgttctgtctcctctgacttggagagacagctttgcctttctgcctcagaagatggaaaaaggagggaagtaccccaagatgtcaccattcactcccccagctcctgggaagatgcccagctaagaggtgcccaatgccagcaggcccagcactgccagctcccagggacccaggccaagccagagactggcctgggctcattgtagaggagaaatggatgaggagagagaagcaacatgcggttttaattctttgttaaaaacttggctgggcactgtggctcacgcctgtgagcactttgggaggccaaggcgggcagatcacttgaggtctggagtttgagaccagcctggccaacatggcaaaaccctgtctctactaaaagtacaaaaattagccaggtgtggtggcggacgtctgtagtcccagctactcaggaagctgaggaagaagaatcgcttgaacccaggaggcggaggttgcagtgagccaagatcacgccactgcaccccagcctgggtgacagagtgagactgtatctcaaaaaaaaaaaaaaaaaaaaaaatcataaaccctaccaaagggtcaatctctctttcagaaaggacattaggtgctgttttcctgctggaagccccataagtctccacgtctcctcaatatacaattcaaaaaagcctccaaattgccgctgctgtcatgctaagcattggaaagttctgcttgaccttttattaacatttttctaaaccaatatgtttggtgtggtggttttgtcttttttttttctttttttttctttttttttttttttttttttgctacaagcaccctgaggacttatgaaaaatacttttttctgtagtttatcccatatgcagttaataggctcacaaatataataccattataaaaaagaaaaactgccaactctgctaaaaaaattgtcataacactaaattattatataaatataaaaggagtgtgtctgtaaaatattcactcaatgaacatcccaaggtgatggttttgctatgttgtttttattcctgagagatccataacacactcgaatatgccacatgtcaccacatgaatcaggcagttaatacatgtgctttttagaagcacggatgtcttcctgatagaatgtgctataaaaaaatgtggagatccggctgctttgtctgataggcataatttaatgtctggcttataatactgcatcttaaggaaaaatacccactgtcctatgtagttatttacaatatattgctaagtctatgcaaatatgtttccccgagcctgggattatataacaaaggtcaacaatgtttgaaatattttgaagcatattcccaatatgcgtagtgtatggtgctaatatccaatatatgcacatatatcttaatatatttccagatctttctgttcattgttctctccgtagcttcccacagaatactattagagaaatgttttcttctgagtaaagccaaacgttgcctatccatcttggaaaaatttattaaggtggctaattatgcggtccttaatattgcattagtaggaaggttgctcaatgccactgcggaagagaaaaagatagaagccagttcaataatactgaaaccagagacgcaatacgtgcaaaaatcagcacacacctatgtcatcctatttttctgccccagatttccaaatcaggcaattccacttagggatcacatgtgtgcctatgcacccacacgcacacacacacgcacacacatgcttgtgatctggtgtgcacaaaaccaacattacaagccacacattctgcttctcccttccaaatattgcagattttgcccttatttttctgaattttgtgatcacctgtgcctttcattcaaatcgcttccttcaagagaaaaagaaatggtttggctaattgcacaagagtaggggagagggttgtggaaaccagacctgcgctatccaagccacatccagaaaatagcataaaagagagatttgtttacatcaaaggtatatgaaatctgagccctcaattctgtcccccatttcaaattatattgttcctctatcattctccagtcactgggttgaaccaaattgggaagactacagtaaaacagacaccaaaacaagagactgaggtcattagaaagaggccgatccccagaaaagatactcttccctggtatgtggaccaggctggactttgcatgtggcttttcatatctgtgctgctgtgacactgtgtagctgtcccaaactctggtccacaacatcacccagaggttgactctggcagcttcagactgccttggtattttgggtcctcgaaaaccccaaggctaaaaatccttccagccaatccatgttttaagacgctacaaaaatcacccattttcaaggactaatggagtatgtctagatgtggctatggaactgatgtatttttttagaatctttttccgtgttatcagtccaaccagccacacagcccacctgatgaggatttttaaaaagagccaaagctgtgaaacctctctcgccagcagaaatgagttatctagaagcttcttgaacagaattctctcaggaggcgagattaagtctgtaatcccagcactttgggaggccaaggcaggaggattgcttgaggccaggagttcaagaccagcctgggcaacccatctctacaaaaaaaaaaaaaattaattaaaaaaatgagttatctcaggaaggcaatcagacacacaatgcaagcctcctcatgagaaagtcagctctgcagtttccccagaagagaatgtcattaccagaaattcacacccataatccccgcactttggaaggccaaggatggtgaatcacttgagcccaggagttcaagaccagcctgggcgacatagtgactgagacaccatctctttaaaaaaaaaaaaaaaattaatgaccttcttgcttgactctggccatggggtttcctgaacccccatgatgatcccacaaagtgtgggggaagtgggaaaatagaacaacacacatgtatgctcaagacagctcctatttcctcctaagccataaactgcttcatagaaccttccagaaggttttgaggaagggttttcacaagggccgagagagctgcgagcatctttgttctcccactggaaactcaactgtatataagacacagcaaatgttaaatcatttaaagagagctatttttcatagtttccagtacataaatgtgtttcagtacatgttattgtaaaatagtgttcctacttacgttcttatacatctgttgttgtgtttactcatcctttcgttctgacttttagaaatagcaataaatctattttttaatcccctctgctgatgactgattattcattgctaaaaggggtggaaggaggtccatgtgaagagtgatccgccctccagcacaagctccactttcacaagataaacagggtccagggagattcctctttcgtcctgggtagtttatgcaaactaaataaggacttggtggcagctcaaacaaatataaattaccctccagtggaaactccaaccacttgttacagtcaatttcagtaaggaggagccaagggtgacatctacacaaacaatacaattcatttctatactgcatccctaatacaaagattgcaaagggcttcgcgggagtcagtcatcactgatctaaaccaaacagggtgggaagccaagaaggcagaaggaggagaagaggaactgctgcttctggaccctgggaagaatcccagctgtaattggaatcccaccaaagcaagtgcctacagctgtgtaaatcaggataaggcaggctcgcactgctgcaacaaacagtcccaaaatctcagtagtttgatacaagtgttaatttatttctttatttttttttaagtttttagagacagggttctgtcgcccaggctggagggtagtggcttaatcatggctcactgcagcctcaacctcctgggctcaagcagtcctcctgcctcagcctcccaagtagctggaattaacaagcacatactgccacacccagctaatttttttttcttttttttgtagagatggggtctccctctgtttcccaggctgatctcacactcctgagttcaagcaatcctcctgccttgaccactcaaagtgctgagattacaggagtgagccactgtgcccagccacagtgttaatttcttgtgctgagggtctggaagactcacaagggcagctgcctcacactccatgtgtctcaatgatcaggctgtattgttctgcagctcctgtatctcaacacaaggcgtctgtggttgcccaggcagaggaagtgaaagaaagccatagttagtcacacacaggctcttctatgctttcacctggaagcactcttttgaccagaataaggcacatcttcctatttgcaagggagctgggaaatgtgggagaagagaaggtcatgtctggtgaacatcactaattctaccccaggtgacagacaatttcacagagccactcatcgcatggggattgcagaatacatcacaaaggaccctctaagcactttccctaaaccgtattgtgcagtatgtttgcccctctgtctacaactaaacggtgctttaactgcattccttgggctaagtgatggagcaaacttaatttcctcatctgtaaaatagggataccagtgccagtctaacaggccaccacgaagacctaagactttatgcatctgtaaactgcacatcattaatgcacacatgtgtgttagtggaagtaacaaccatagctactgggctagtatttcagcatgtggggcagggaaaccctggttcaatgcctagaacttagcatccagaatagtcaccgaatggtgacccccatccagttccatttgatgtctaactggctgctttggtgattgcttctgtttttagggcctttcaaatttactctgctttaacatatctgctgatgatatgaatgtctgtacttatgtctaccagttcttaccttagagtactggctgggattttttttttcttttctaagatggagtctcactttgttgcccaggctagaatgcagtggtgctatcttggctcactgcagcctctgcctccacggttcgagcaattttcctgactcagtctcctgagtagctgggattacaggtatgcaccaccatacctatctagtttatgtatttttagtagagatgatggccaggctggtctcaaactcctgacctcaagtgatctgcctgccttggcctcccaaagtggctcacaagtgtgagccactgtgcccggcctactggccgagattttttgatgaactttttaatggcatctctcccagataccttacaatgggattcccttgcaggtgcttccatttgcacttagcccgtggtcaagcttgtttattttgccacactcaaaagtgaattccaatgaatattggaaaaggccacaggatctggttatttttccaatcatataatgctgattttcttgttttgttttgttttgtttttgtttttgttttgttttttgttaaccacatgtattgcaaactcttcttcctaaaaccttcttggcatgtggtcatctctgggtcacatcagaaaggaccaattgcaaacaaaaccaccttgaggctggacaaaaggaaaagaatgagatggactctttcttgctgggttcttttggagatggcgaggcatagcagggtgaaagaaacttggctttgaacttgagtttcaatctcaattctgccatttgtatacgtgcccttaaacagctggtacctgatatagtttagatatttgtctacattggaatctcattttgaaatgtaattcccaatgttggaggtggggccaggtgggaggtgtttcggtcatgggggtggatccctcatgacttggtactgtcctggcaataatgagtgaggtcttgcaagatctaattgtttaagagtgtgtggctcctgccccttctctcctgctcctgcttccaccatgagaggtgcctgccccctcttcgccttctgccatgtttggaagcttcctgaggcctcaccagaaacagatgcaggtgctatgcttcctgtacaacctgcagaacttgagccaattaaacctcttttctttataaattacctagtctcaggtatttctttatagcaatgcaagaacagcctaatacagtgtccggtcttggggcctttcctggaaggagaggagggcggtacagggaggactccataagacaacaggccaaggactatggcttggtgggtactgagcatttggtgaagcctagttctcttactcaagcttcaggtgacacaatcatcacggggcacctgaagtatcataggactgcgccagtggaggagttgtggacaagttggtacaggatgtgcatgcacataaatagtctcctcttcataactttctgttgaaagaaatggagccatctccagcaaggaaccatgagactttctcatggcttgagctgtgacctccagaaacgtcctccaacagagccgtccaacagtggattttcctgcccaacagcccaacacacgagtgcaagtttgatcttcgccacctcctccaatgctatggtaggtgaccccggcagcaggattggaatgattattgaagtcattgcttcattctcagactacaccaaccaatgcccagttcagcttttccccaccagtctcttggctgtttcaaccaaattacaaaaacgtgaagataaaataattagaaatgctcatttgtcactgagaatctggcaagcaaaacctatattttgcaagaagttttaatattgtacttttttgtgctttcctaaactaatttagtctactaattttctataattacctgcatgctcttagcttccgctggtcagatgagttctgagacacttatataaccggcattaaaaagatgcatttagcggctcagatggttaaagtaccaaagcctatagaatccggaggttattgtattctcccacaagtacttaaataatagcctaaaatctgaagaattactttaatactccaataaaaataacccaattcaaaacattttcaaggaaacagagttctttgctctaggctaccgagtaatggctgagaaaaagtatatagcctgtcacttctgattagagaactgtgcctctgtgctttgaatgaggggcatgtctggtaataggaagtgcagatattaaagttaataaaataatgtggaatacgatatatatgaaacttgaccaactagagcacagaatataacatacattaccctgttcagtcaactcctgtggcccggcatctaatgacaagtttaatttctgtttccaatgagagtacagctaaaaatacaatttccagattagacaaatattttatccgactccctaacaaatgtaaccaagaatggctgacgtgtctacacagatgcccagtgaccatgagagggaattactaggattgcaaactgctcagcctcaaaagtccgtgaaaccccatcatctttgaggtcattataaataattagttgcagacgcagagatgttgaggcttcgtcactaggaaagcacaagggtggatccatttctctcctgccctgagaggctccaagctccctctcggcacaattaggcctccccaaaccatccgacatcaaggcccctgaacacccattattgcatctttaatctaaaaccccaacgccaaccataatggtttttgtttttcgatacattaaccttcaacttgtattttcactattaaataaccagcctgagaacctcttagaatttttttttcccagtcacctacaagaaaccatgcagttcccatgacatgaccctcttaagggatttaaaagcaattcaatgagctaatctcagtaaacctagaattaaagttcttgtttccatatttcactttcaaaatatttagaactttgacagatatgacattatgttttcattaaaacagctgatttcaaaatgttgctctgtgcagaaacgccataaacagtttatgatgaactgccacgctcttaattaaaacaataaatccagcacacaatatttgtgcagcctccggtctgacctttgcctcttgctatccaccaccaagccgcggctgcgttcccaacgccagacgtggaaggttttaaaacatgatctgaaaggcactaaagataaaataagagaaaacgtaccattagtcttcgcagttatgattaattcagttcatattttacaatctggttatggagtaaaactgcagactttacatcaagtatttgccattcactatacctaatgtataaaaatgcttgatattttagaaaatggcaccgagctaattcaccacaaccccatgaaggacaggaattgaaataataaaaacagagagtgattcgctatccatccaaagtgaagataggttcgcactggttggacggtcagcctcggacgataaatatgtcgattgcagcccggcttcaccatgccacgtttatctctgtgccgcgagatttcagattaaaatattccctaaatctctcacatctgcttccagagcaggcaacaagggtgttaattaccaagcagtaatgacagttgatttgtttccctggcctggaggcaccaagctaacttccagccttgccatcctcaaggacagaaatgattctgaactggggctcactcatttgtaccccatagagagagagcactgggctggtttggggaccattttgtagcctctctgtggagggatgcgtggacagccagcatctgggctccaggagaaaatgctcccagctgtctttggagcacagacttcctgcaggaaggggagggagtgtccaggcacctttgagggcatggagacctacctcatgatgcctgcagcaggctgacccccaagacacctccccatcacacctaacatgagcatgtgtccccatgcccgtcctccgggctttgtcttaccaccttctctgtctttccaaccctctgtccccacctgctccacatccatatgacaaacacatgcacacaatacatggactaatgcagagctggggaagcaaagcctctgaggctgggagaccaagggtgacagtgagtgggacccagctctgcaggtccttgtctgagttgcaggcagagtgcaccagggttccagaaagatggaggaaaggaaagcagtgctggccatgggaggccattcaggctcgcagccccggacctgggttccttctgcccacattagaaggagtagaaccccacgtgggccacctctctctgccagggcaagaccctcacgttggcctacctggctccagcctttgctcacctccaaagcctatcatgcctttcctctcccctctccaggacccttacttccctctaagggccctttccagcctacacagcacagtggacttagagctgtcatcgggacctgaaccctggagggaaccaatgctatgcacccctgcctgccatggagcctccgaagcggcttccagggaaggcgctgccagagcctttctcctacctggccctaaagacgtgccttagcccttgtttggttggggaattctgtcccagccatcctagctgtgaaagagccctgcaggaaggttaggccctgggggtccctgagcaccatccaggactcctgtgctcccctggccctgccccacgtgcaacatggctctctgccagggttctcactcagtgtgctcactgtgtgtgtgtgtgtgtgtgtgtgtgtgtgtgtgcgtgcgcgcgcgcgcgtgtgtgtgtatgttcggatgggatctcgttatgttgctcaggctggtcttgaactcctgggctcaagcgatcctcccatctcggcctcccagagtgattggattataggcgtgcaccatcatgcctggtcaagcctacagcgcccagtattcccagacagtctcccatccaagtactaatcaggccccaaccctgcttagcttccaagatcagataagaccgggcacattcagggtgatattagggttatgccttacactttgaatcaagcatcagagttgagatggggcccatccaccttcctgtcttcacaaaagaaggtaccctaatggcagttaaacccctctgccccccaccatctgcccctacacccaggtacttggaccagaaggaacagctccagatcctgggtacctgccatcccaccccctacattttccagctgtgcagcccaccctggcccacaaggtcacactacatgtatccctgggatcacagtggcccctgtgaatatcaccattttttagaaaactgatagatcagaggaataaagtcaccatcctgaaggcacccagtgaataagtggcaccacggaattgaaacccacacccagctgagcacggtggctcacactcgtaatcccagtactttgggagacagaggcaagtggatcacctgagctcaggagttcaagaccagcctggccaacatggtgaaaccccatctctacaaaaaatacaaaaattagccaggtgtggtggcgcacacccgtggtcccagctactcaagaggctgaggcggggggatcacttgagcctagggggttaaggctgcggtgagccatgttcgtgccattacactccagcccaggcatgcagtctcactgcagtctgagagtgagatcctgtctcaaaaaaaagaaacgcacatcctctgcctttagggctgataggccctgatagtaatgccctccaccaccctatgcaaccccaccctcggtcagacccttgagtttctcaaactgaggcccatagatacgtcctcaggagttcacgactcttttttttaagttataattttttttttttgagacagagtctctctgtcacccaagctggagtgcagtggcatgatcttggctcactgcaacctccacccctgggttcaagcaactcttctgcctcagcctccagagtagctgtgattacaggcatgcaccaccactcccagctaatttttgtatttgtagtagagttggggtttcaccatgttggccaggctggtctcgaactcccgacttcaggtgatccgcctgccttggcctcacaaagtgctaggattacaggcgtgagccaccgtgcctggccggtaagttttaattttgtgagtgttttcacttagcacattcatctaaaagaaacaatgaataagataaattctggatcacctgggtgaccagtcaccatgtcatctccatacagtttgtgttttccgtcagaacagacatacctcgttttattgcattcactttattgcacctcccagataattgtgttttttacaaattgaaggtttctggcaaccttgcatggagcaagtctatgggcaccattgttccaacatcaggtcctcacttcatgtctctgtgtcacatcttggcaattcttgcaatatttcaaactttttcattactattataccattatggtgacctgtgagcagtgattttttttttttttttttttgagatggagtctctctctgtcgcccaggctggagtacagtggcacgatctcggctcactgcaacctccgcctcccgggttcaagcgattctcctgcctcagcctccccagtagctgggactacaggcgtgtgccaccatgcccggctaatttttgtatttttagtagagacgcggtttcaccatattggccaagctggtctcagactcctgaccttgtgatccacccacctgggcctcccaaagtgctgggattacaggcgtgagccactgcacccagcctgagcagtgatttttgatgttactgttgtcattgtttggaggtgccaagaactacacccacataacatggggaatttaatcgataaatgtgcacgttctgaccgcttcaccaactgattattccttcatctctctccctctccccaggcctccctattccctgagacacaacaatattgaaaactggtcaatgaataaccctaaaatgtcctctaagtgttcaagtgaaaggaagagtcacgtgtctctcattttaaattaaaagctagaaatgattaagtttagtgaagaaagcaggtcgaaagctgagataggctgaaagcgaggcatctggtgctagttagtcaagttgtgaatgcaaacaaaagttcttgaaagaaattagaagtgctactccagtgaacacacgaatgataagaaagctaaacagactcattgctgataaggagaaagtttgagtggtctggatagaagatcaaaccaaccacaacattcccttaagccacggcctaatccagagcagcccctaactctcttcaattctatgaagcctcagcgaggtgagaaagctgcagaagaaaagttggaagctagcagagtttggttcatggggcttaaggaaagaagccaactccataacataaaagtgcaaggtgaagcagcacatgctgatggagaagctgcagcaagttatccagaagatctaagactattgagaaggtagacacactaaacaatagattgtgtttctttgtttgggttttttttttttttttgagatggagtttcattcttgttgcccaagctggagtgcaatggcgtgatcttggctcaccgcaacctccacctccccggttcaagcaattgtcctgcctcagcctcctgagtagctgggattacaggcatgtgcaaccatgcccagctaattttgtatttttagtacagacggggtttttccatgttggtcaggctggtctcgaactccccacctcaggtgatccacctccctcagcctcccaaagtgctgggattacaggtgtgagccaccacgcctggcctgtttatttctttctgagatggagtgtcgccctgtcaccgaggctggagtgcagtggcgtgatctcggctcactgcaacctctgcctcccgggttcaagcaattctcctgcctcagcctcctgagtagctgggacaacaggtgcctgccaccatgcccagctaatttttgtatttttagtagagacaggtttcaccatgttggccgggctggtctcaaactccagacctcaagtgatctgcccgctttggcctcccaaagtgctgagattgcaggcatgagccaccacacctggcctaaacaacagattttagatgttcagtgtagatgcaatagccttctattggaagaagatgtcatctagaacttccatagctagagaggagaagtcaatgcctggtttcaaagctttaaagagcaggctggctcttgttaggggctaatgcagcgggtgactttaaggtaaaaccaatgctaatttgccatttcaaaaatcctagggtccttaagaattatgcaaaatctactctgcctatgctctagaaatggaaaaacaaagctggatgacagcacatctgtttatagcattatttactgaacagtttaaatccattgttgagaaacactgctcagaaaaaaaatattttttttcaaaatattgctgctcattgataatgcacctattcacccaggaggtctgatgaagatgtataagaagatgaatgtagttttcatgcctgctaacacaacatccattctgcagctcatagatcaaggagtaacttcaactttcaaatcttattatggaaaaaaatacacttcataaggctatagctacgattaatagtgatttctctgacggatgtggacaaactcaattgaaaaccttctagaaaagattcaccattctagatgccattaagaacatttgtaattcatgggaagtactcaaaatatcaacatcaacaagagtttggaagaggtttattccaggcttcatgaatgactttgaggggttcaagacttcagtggaggaagtgactgctgatgtggaaatagcaagagaactagagttggaagtggagcctgaagatgggactgaattgctgcagtcttatgaccaaacttggatggatgaggagttgcttcttatggatgagaaaagatagtggtttttgagatggaatctactccttttaaagatgctgtgaacatggttgaaataatgacaaaggatttaaaatattccacaaagtagtggcaggttctgagagatttattctaattttgaaagaagttctactgtgggtaaaaggctattaaacagcattgcacgctatacagaaatcttttgtgaaagaaagattcaactgaggtggcaaagttcactgttgcctcagccactccaaccttcagcaatcaccactgtgatcagtcagcagccatcaacatcaaggcaggatcccccaccagcaaaaagagtatgacttgctgaaggctcaaaccatgattaacattttttaccaataaagtatttttaattaagatatgtacagtgttttttagatataattctattacacacttaataggctacaggttacagtatagcataaacataacttctatatgcactaagaaaccaaaaaattcatgtgactctctttattgtgatatttgctttattgtggcagtctgcaactgaacctgcaatacctccaaggtctgcctgtacactcttctaatcatcagggactaaagggatgggggcagaattaatgtgcaacttatgcactggggttgaaggaagacctaatggaattgtagaattctgttcatggctgtgtaagccctgagtttgtccaacctcagagtgggaagaagagagtattcaatgagaagactctccattgagtcccctctcagtttatgcaagtccatccaggtgggcaactggaatcttctctctgttctccctccttcatttctcccacagcttccttggcctctttccattcctaggtgtcccctctggatccatgccccacgctggagggacatcatcagatctttcagctcctgcattacactgagggttttagatatctcaggttcttcaaactgtaccaatgactttttcttgctcatcttgacagctcttagagaataactttcatgtgttgttatgccaatgaattatctcctttttattggttcttctggaaggaatgagggagataaagaaagaaggagccaaggaaagaagaaatccctatcttgtcaccagtggtatcaccactcttcgccattgctggagcatggctgaaactccattgctgggagccgactgaacttccttactcaaaaccagacttacatctgaaattcagcctggtgatgttgttgggaaacacttctcccagagtatctgggtggggtggagggactctcacctccaagtgaaagggattcccaccaccaagaagaaaagtgatggaagaattgagtcagctccacctccactccacccccaagatatgtaacattaccagtctggaaagaatccgggtcatacttgtcagttcccgattcatgttgtaaataacggtttcatttcagcaaaataacatcatccttcccattaaaggaatgttgctgttttaaaatggtactggtttcataacatttttgtttttaatttgtaagtgtggcttggttttgtagttttataaaagctataaatataaggagtttttatctactttggtaagatctgtagtcaggactgttactatcatttctattgagtagtgatgaggatgaaatgaaataatgcagagaaaggtgctcagctccctgccaggcacataggaagaacttattaatttttactgaatgctgatgttgttttagaatcatatatattacaacaaaaataattcaagttattattgaaggtctgcaatatttgtttgtttgcttgtttgttgttttttcagacagtgtctcactctgttgcccaggctggagtgcagtggtgcaaccatagctcactgcagccccaacctcctagacttaagcaattctgccacctcagccttccaagtagctgggaccataggcatgcaccaccatgcctggcgaattttttgcagtggaggggaggggtcttgctatgtggcccaggctagtctgaaactcctggcctcaagcaatcttcctgccttggcctcccaaagcactggggttacaggtgaaacccactaagatcagtcttttttttttttttctttctggataagctacatgagtcaagcttgaggatgaaggggctgagccactgggcctccaggaggctgggtctcactgggagggaacgagttgacctaaaggagtagccactaactcacgaatgcccactacacaatgggaggggtgccatgtaaagagaggaagtagaaagtgcaagagggtggaaagagaagagaaaagcagattagagcaaaggaagggcattaagagcacggagggagctttcttactcatccccgttgctccagcatggctgaaaccccatttctgggaaccagttgaacctccttactcaaaacttcagacttacatctgaaattctctccacccagtgatatggttggaagagcacttctcctggagcattttggtggagtgggagtttctcacctccaagcctttctacctgccaggaactgtacctctactccctattcacacacacctaatgaaattccacccattcccccagatcctcatcataaggagagagcatgtaggtctacttggagctggtatgaaaatctccccaaagccagggcattggtggattgatattaccatttcttaccctccccttcttggttatcaagacagaccgcagagtggaggcctagtaccctggggggtggcatctgcaggatggaggcccaatgccctggaggttggcatctgcagggtggaggcccagtaccctggagggtggcatctgcaaggtggaggctcaatggcctagagggtggcatttgcagtgtgggggcccaatgccctggagggtggcatctgcagagtagaggttcagtaccccaaaaggggcattggcagggtggaggttcagtgccctggagggtggcatctgcaggatggaagtccaatgccctggagggtggcatttgcagtctggaacttcagtaccctggagggtggcatctgcagggtggaggcccagtaccctggagggtggcatctgcagggtgaagactcaatgtcctggagggtggcatctgcagtgtgggggcccaatgccctggagggtggcatttgcagggtggaggctcagtgccctggagggtggcatctgcagggtgaagactcaatgccctggagggtggcatctgcagtgtggaggttcaatgccctggagggtggcatttgcagtgtggaggccaatgccctggagaggtattcaagagatcaacccacctcagcattccaaagtgctgagattacaggggtgagccatcacgcctggccttgcctggtgttcttaaaagaagagatcaggacacagacacactgagggagaccatgtgaagacacaaggagaagacagcctcctacaagccgaggagggaggccgcagaagaaactaacccccctacaccttgacctgggacgtccagcctgcagagctgccaggaagcatacttctgttgtttaagccgctccatctgtggtcattcgtttggccaccctagcagactcatacacctttggaccccaaaagtcgagaactgacgtgaacttccctgtgttccactgtgctgtcccttccaccaggcggatcctgcccagttggtctgaagaaggtgggcaaacgctgagcgtcacccccaaccccagccaccattctgccccttcggactcgccccccaacattggaggtggaagtgacatggatcagcagagggggcccgtgatctgggcctccctcagtgccgacatcagcaggagggacctggggcaacccccgctgacatggtttggatatttgtcccctgcaaacctcatgttgaaatgtgacttccaatgttggaggtgggcagagggaggtgtttgggtcatgggggcagatcccttatggtggcttagtgcctttcctatggtcatgagtgagttctctctctgttagttcacgcgagagctggttgttcaaaggcgcctcctcctctctctctctctgacgccctctcctgccacgtgacattggcctgctccaccttcaccgtccaccatgattggaagcctcatgaggtcctcaccagatgcacatggggccccatgcttcttgtaaagcctgcagaatctgaggtattcctttatagcaacacaaaacaaactaattcgtgcatgcgtctgcactgggttggtacttcgtggtgtactttccactgtcggcccaggcacagagcaatgctgggcgctggcccctcagtgactgtgaattcctgcaggtagccagcccagctccgcagcctccccagagcagcccaccatgcctcccctcaccgcccgtgcacccagggacacccacctcccagtcacctaccccactgcagtgcctggccctgtggtgcagggcgggagggccagaggcacgggtgggggcataagagctcctggggctcagcttggctttacaagggtccaaatggaccgtttcatttccctaactagccttccaggaacacttccacacggggccataaaagaaggtttagaaccaggaacttttagaagggcttttatctctgtgagtgtctattgagttttacaccccttcagggtatctgttggctgtgggcggagagggaaaaggcctctcattaaatgtacaaaggaagcagcggccagaaatgcgttggactctttgctctctggctttcaggtaattcttgggagttttaaaactcagctcccaggggagagcaggtggcagagtgaagagcagcgccctctggcagctgatggtgatttgaggcctagaggaggtccaggcagcggcctgcagcaccccaccccccgccaaggcctcctgagggccacaacaggcagagacaaggagctgacccatcggaggggggcatgcccaggcccacgtgcacctacaagcatgcaatccccacagacacctgcacacacacacacacacacacacacacacacacacagcatgcttgcagtcactcccaggagcagggtcacccacagggacctggaaacacccatcccaccttccttggaccttctcttccctggtcaccaggcctgcacccaattccaccccctgggccctcctttcactcctcacctccctcccatcctctctctcttcccatactcatagtgacaacaggccattttcagaaaaggtggccgggggcagcgccattgctcctggccgctctggccaccacctgctgagcacatctgaggacaagctgcagcagccctcctgggacccaggctggattccatagggtcaggcctgatgccagtgggcaggtaagggatggcaggcctgagagagaggctctcacctccctcccttccaacttacagccagccacaccctcaggctctggaagcgagtgcagccagctacacaatgtgcccaggtgcccccaggtccctgcatgtttccccacctgtctcagaacatcccctccactgccacccgtgtgttaatgccaaaccatgggctccaaggccccagcgtagaagcaagggttagagtaggcttagagcagcagcgcccagccaagcggtcacactagctctgtaggccacccagttggcacacgccaaagccaggcacggcagcatgctcttgggaacacgggctggagagctctgactccagctcctgcgttacctgcccactgactctaagcctttgtttcttcatccgtacaatgggagagaatcacagaagtaagtcgcttcgcaggcctgttgtaagagcaggcaacacactgcataggaagtgctgagcaccacgcctggcccacgatttggctctcaactccaactgtcaccatcttggctatcatcctggctaccgctttcctgctaacattgcatatcctacccaatgtaaacaaccgcccagtgacccgcaaagggctcaggcttgtccaagagccaggcaatctacattttcccaccaacctacggggacaggcagcaaaagcactggcctacgctcacctctgtagcccccaaccacaggactccagcaacatccgaccctgggcctggctgggccccatctgtctggaagtcttacccggttctttctctcactctgaggcctccagataaccgtggagaccaagacagccagagccgagctcgagaaatcattccgttctgactaggaaggacgctgacattcccgagtctatttccatctcggggctcagaaattttccagagacacccttcgctcggcggtgaaggcaggtgcctgccagaacagtgcccacaccccctgcccctaaaaccctgcaccccgagccctcagtgaacacaggttgtaacttcaaaatcaggaaacggaacattgctaattctcacggcagcattaactcattcacttgcacatatggggtacttggatcccagtaggtcttctatatatataacttattatacagtaggtgcaacttgggagaattaatgttgctataggaacattcggatcaaggctggcttccagagggaagagagaaaaaataagttttcctcctcagtgtacttctctgttttgagtttcagagaggaaggagcggtgtaatcaagtcagatgaggcaaggaggggcttcccttagtggtttggagaaggtgagaattcctggaagctgctcgctggggagagaagacagaaaagctcagaacatgagccaagtgccctcgtggctaagaggaccaggaaagggacttcaggggccagattcccccagccctggccagcagctccaggtgccaaagctggaacatagccttggggtgatcttcccctgagaacgggctgaaagccacctaaaaaacagcatcctgtgtactcagtcccccagccccacacccctaagtctcattcctcccaactttccatccttcccaacgataaggtgaaagcaaaggggaaattgaaagtgagtttcgtggtctacactggctcctggatggaccattgggaggacccatccctggctgaaggtcttaagcaggcagcgtattggaagcttgcatccaccatagcctgtataactgagctctttcttccggagcagcgattttgtgtccacctgtgaatgctccacctaaaccaaactatgtgttaaaaacccgggcacttggctccaaacctcacctattagaggttttcctgattggtaaatctgaacatgcatcgaatcccccaagagctatgagacgtgtaattctactatctcctttgcagacgacaggggtcctaaatcgtcctcccccactaccttccctggcacatctggggatctcagcaggctatgggtgtcgtgaaggtcacagcacagccagacacaacacctcacatacaccccaaacacacaccccaggatgactgcaccccccaggcagctgggctggctcctctcagctgccttagcagttggcactgtgctgggcaagaggagatggctcagaacgggttggctgcaggagtggatgttgagcccaagatggcagcaaagagggaaagaaaagatccacattcctaacaccattttccagctcagtgttcgccaggtgcccactcgtaccaggtgctatcttatgcctgggggatccagagataaataagatactacctctgctctcaggatgctcacaggctggcgcggtggctcatgcctggaatcccagtacctaggaaggcacaggaggtgggaggattccttgaggccaggagttcaagaccagcctgggcaatatggtgagaaccccccccaaccccatctttacaaaaaataaaattgtttaacttagtcaggcatgatggcccatgctcacagtcccagctactggggacgctggggtggaactactgcttaagcccaggaggctgaggctgcagtgagctgtgattgcaccacggcactccagcctggccaacacagccacaccctatctctgaaaaaataaaagaaaataagaagatgctcccagtccaccaaggggaggaagaaggagaggcctggaaataaataaccaagggtcatgtcttgcttcctgcctccccaggaaccaagcctaggtagggctgaataggcacctgcaaatgcccatgcaaggaccactgagatggcagaatggcagggacccgcccaaggagaagtaccaagtgtccaaaggagcctggagtggtgggaaattcattctgaacaaggaggcgtcgtcccacaggctttggcccgtcccctcccacccagctgaccagagacaacttgcaaagtccaccaagaagcaaagcctcctttgccattcagtatttcagacacattccacacaccacgacgggcaaggggccactgccgcccagagctgctgctttgcatttcatctgaagctgtgtctacttttaaaaacatatataacagtgaagtggaatctctaagcgctttccgggccactccgctcggaactgcgttgccaaacatcctaaccatttggaggggctgagtcctagagatggggaggaaacagaacagccctctcctcggggaaggtgagcagagaggacattagcattcttctccttcctgcttctcagatcggatcatctacgctgttaaaataaaggtggatttgcagcatcccagagtcaacaatttgccaaatttcatgtcacagaccagcaagggagatgagtctaatacacccacagatcctggttactctcagatgggggcaggcaggtggtgaagggttacctgtttaatcatcaaaagcccaatgggtctcccgggcattgctgagagagaccctcttctagagctcccaggcccctcagagcctcctacacatttgtcactctgctctgtgtcggaaattcttctctttgttcccttagctcactttaactcaagtgtggcgtttttaattctgtctgtggcatgattttcaaattaagcagttggtgtgctgacagctggtgttacaactggcctattccctccccccgccaccccacccacaaagagccaacgtggtgggtgcacagcctcgaaggaactcacgcacgttccaaacacccatctcctccacgggggtggtggagagttgtggggagtgcttccgaaatgggtgagagtgctgagaagctaagatgggaacagactctcacagccctggggacatcctggggtgggacaggatgcatccgaaaaatactacgctccactttccaacacacctcctgggacacaattcaggtccaaaacaccctctacactgtcaggatacctccatgcccctcatgggtcaggtcacaggccatggctaagcaccagcgcccctgcggtgcctgtgtgtcccgtgggtgttacaaatgagaattccaagcagagtccgatttgaaagtcccatttctcttattcttttctcttgttctctgtctcatcacagccctgggactgctattcacctgacaaccctggacaggtgaaggcgttcaatttcctggggagtaggcatttccagaattttgcttagacgagagtactcagaaatggtccctaaacatggaaacaaagttgtgaaggcaaccccgaaaagacctggctttatggcatatggaagtaactatgcacacttccaagccacatccatgccagttggccagccacaacctgtctccactcccacgcccccacctcccagcccatgcccatcattgagctccccttgtatgcaaagcctactaactttagagagtaacaaacagaagtggtcatgccacctacctctcagcctctggcaatccttgacatcgtctaacttaaccatagctgatggtgccttctttgttttttcttttcctggaggcatttttatcaccttcataatttaacccatttctgaaactaagcaaatgttgcatatgctagctgtaaagtggaagttttgaaaataattttttttgaagtaaggagtatcctagatctcagaatctgtaaataagtcaacaactgtccaggcacagtgtttcacccctgtaatcccagcactttggaaggccaaggttggagaaacgcttaagcccaggagttggaggctgcagtgagctacaattgttccacagcacttcagcctgggcaacatagcaagaccccatctctaaaagaatttaaaaattagtgagatatggtggcacacacctgtaatcctagctactcaggaagctgaggcaggaggatcacttgagcccaggagttcgaggctgcagagctatgatagcaccactgtactccagcctgggctacagagtgagactgtctcttaaaaaataataataagtcggtcgggcacagtggctcatgcttgcaatcccagcactttcataggccgaggcaggcacttgaggtcaggagttcaacaccagcctagccaacacagcgaaaccccatctctactaaaaatacaaaaattagccgggcatggggacaggcgcctgtaatcccagctactcaagaggcagaggcaggagaatcgcttgaacctgggaggcggaggttgcagtgagccaagattgtaccactacactccagcctgggcgacagagtgagactccatctcaaaataataataataataataataataatgtcaacaattaatctaagtatctaacatcttattcatatcaatacaaagctgagatttctgcataacaaagaatgtgtcattcctctttgcaaagttaaataaagtgttcacaagaccgttcctccaatggaacttttctttggctcctatggcttccaggaaaatgcccagagtcccaccaaagcctacagagcctgcctgattggtctgtgcctccccgcagccatgatagcccaggcctcccctcccctggcctttccactccttaagcatgcacacccctccctgctctacgggtagccttgtgcccacccctctttctctatttgaccaactctgcctcattcttttcattctacataaatgatgctccttcaggaaagcaggccttttcagactctactacagcctctaagaaaccccactcttttccttgagagcatgtttcattcctgcaaatatgtaattacttgggaaattataattttactacctgtctaacttcatatgggcaagaactatccatttttctcaccatggtatctcccaccctaaacaaatccctagtgcatagcagatcctcagaaaatgtattttttaatggagcatggatctccattattgagtcatgcacacagttaggcttttagaaggaaaggggatgaaattgataggttagacctcatcaaaattaaaaacttttgttctgcaaaaactctatgaagaagattaaaagataagctctagattaggagaaattgttgcaaaccatatatctgacatgacaaaggactagtatctagaatacataaagaaccctcaaaactcaacagtgaaaagaaaagaaactaatttaaaaatgagctaaaaaacatgaacagatacttcattgacaaggatatacagatggcaggtaatcacattgctacaggaaaggggtctggatccagaccccgagagagggatcttggacctcacgtaagaaagaattcagggtgagtctataaagtgaaagcaaatttattaagaaaataaagaaataagagaatggctactccatagacagagtggccctgagggttgctggttgcccatttttatgtttatttcttgattatatgctacacaaggggtggattattcatgcctcccttttttagactatatagggtaacttcctgaggatgccatggcatttgtaaaccaccatggtgctaatgggagtgtagcagtgaggatgaccagaggtcactctcatcacatcttggttttggtgtttttggctgtcttctttattgcaacctgttttatcagcaaggtctttatgacctgtatcttgtgccgacctcctatctcatcctgtgactttgaatgcattaaccatctgggaatgcaacccagtagttttcagtcttattttacccagctcctattcaagatggagttgctctggttcagaaacctctgacaacatgaaaagcaaagtacacttggcagtaggttttgaaaagtctattttctttatgttcagagattctacttctgcagattgctccaaaggaaatagaaatgtgaaaaatgatttcaagatccaggaagtgtatggtagactggataaagaaaatgtggcacatatacaccatggaatactatgcagtcataaaaaaggatgagatcctgtcctttgcaggaacagggatggagctggagaccattatcctgagcaaactaaggcaggaacagaaaaacaaataccccgtgttctcataagtgtgagctaaatgataagaacacatggacacatagaggaaaacagcagacactggggcctatcagaaggtggagggtatgaggagggagagatttagaaaaaataactagtgagtactaagcttaatagctgggtgacaaaataatctgtacaacaagcttccatgacacaagtttacctgtataacaagcctgcacatgttcccctgaatttaaaataaaagtttaatttaaaaaataatgtcaattgtagcattatttacttacaatatttaaccctctaaatctccaactacaaggcattagttgtgcaaattgtgtttcatccaaaagaacctaaagggcaggcgcggtggctcatgcctataatcccagcactttgggaggctgaggccggtggctcacctgaggtcaggaattcaagaccagcctggccaacatggtgaaaccccatctctactaaaaatacaaaaagtagctgggtgtggtggtgcatgcgtgtaatcccagctacccaggaggctgaggcaggggaatcacttgaacccaggaggcggaggttgcagtgagctgagatcacaccactgcactccagcctgggcgacagagtgagactccgtctccaacaaacaaacaaaaagtaccttgaatttaaactcctccaaggcgaggatttttgtgtgggcatcagtgtatcccaaatgccttcatgaaatgagcttcattaaatattatcagattggccaggcagtggttcatgcctataatcctgtcactttgggaggccaagataggcagatcccttgagcccaggagtttgagaccaggggcaatatagcaagacccgtctctactgaaaacaaaaacaaaaacaaaaacaaaaaacaaaaaaaaaaaatctaaaaaaaaaaaaacaagataattagccaggtgtggggatgtgcccctatagtcccagctacccagctacccaggaggctgaggtgggaggatcacttgagcccaggaggctgagactgcaataagccatgattgcaccactgcattccagcctgggcaacagagtgaggccccatctcaaaaaaaaaaatcaatatatcagattgattcaacctgaatgatgaaacactcagcaccacggaaaatcatgacatgagaaaatgttcacaatacagtaagtaaaaaaaaaaaaagaagaaagaaagaaacagattgtaagactctacatacatcataaccacagttttgtttaaaggaaaagaaatatacgtatctttgcatattaaaagactaaagcaaagtaaaccaaaacattagcaaagactatctctggtgaatgagaccttaggaatttttcttttctttctttaccttctttcatttcttttgtgtgtgtgtatgtgtgtgtgtgcgtgtattctatataaagtattccaaattttctacaaataacatttattcgtttttcaaacagaaaataagacagtaaagtgaggccagacacagtggttcatgcctgtaatcccagcactttgggaggctgaggcgggccgatcacttgaggtgagaagttcgagaccagcctggccaatatggtgaaacttcatctctactaaaaatacaaaaattagctggatgtggtggcaagcacctgtaatcccacctgcttgggaggctgccacaggagaatcgcttaaacctgggaggtggaggtttcagtgagccaagatcacgccactgcactccagcctgggtgacagagtgagactccacctcaaaaagaaaagaaaagaaaagaagacagtaaagcagtttggaatccatgtggagttgtgatttctgaagcaataatggaattggcagggatttgcagggaacgccctgcccattggccaacagcacacctcccagcaattcagcagtttctcagactacagtcaaaatggcaccttcgggatcttatgcataaaccggcacctattgtcctcttgtttactgagtatttttccttaaattgaggctttttatttaaagacatttctttacagggaatcttgatcacgaccatgaagggaaatccgtatcacttgtcataaataaaatgaaactgtacaatagatttcatttctttaagtggccttatttagctctagctgaatactgtcgcctgcagaaggttctgagtcggaggcctgctccctcttttgtgacaaaagaagattagcaaatgtaagagaagtgggcgttaaagacatatctgcagcaaagaagcgtttcttctgatattgtccgaaggcttgaaagtggattgaaggaggaatgacatgttgaagccgcatcgttgtctggggtaatacgcaaggttcattgtcccatggccacggaaaattgggactcagacacactagagtggggttaagagaggaagtttaataggcaaaagaaagcgaagagctctctgcacagagaggggtccgggagaaagtgggttgctgcttcagcggtgaaatgcaagaggttttatagatgagctagaggaggctgtgtctgatttacgtagggcataaacgattggtcggaccagatgtgtcatttgcataaggtatgaagaagctgaccaccccaccctaatcttttattatgtagatgtgttctctaccttgccggcaccatgttgcctgggttctttttttttttttttttttttttttgatggagtcttgctctgtgcccaggctagagtgcaatggtgacatctcagctcactgcaacctccatctcccaggttcaagcaattctcctgcatcagccttccaagtagctgggattacaggtgtacgccatcatgcccagctaatttttatgtatttttagtagagacagggtttcaccatgttgaccaggctggtctcaaccttctgacctcaagtgatccacccacctgtacctcccaaagtgctgcgattacaggcgtgagccaccgcgcccagccaactgtggttctttactgtacatgtggtgacacagaaaagggaagatggagcctccatgttgaacatacctggcttccaggtagcccttttctattggcgcagttaccagcacttacccgtgcaagctcctagcttgctcatttatgtttgcagctcgatttttcaggctgctctttgttggtttaggggctgctttttgttgaaagggaacccttgcggaggacttgtttactctcactatctgcgtaactaatttctttccagctcctgtatcagtttgattccatgtcatttattgccatgtccctgtagtacccacaagcattcctcaggctatccgtggtaggcattccacactcccgggctgactgggcctcactgctgagcctaaatgaagccctggggtgcaccagcctctgccacgctggggatccactgtccccctctgcactgtcccatacctacagccctactgtcagaggcgtgtgaacaagagcaactccatcttgaataggggctgggtaaaatgaggctgagacctaatgggctgcattcccagatggttaaggcattttaagtcacaggatgagataggaggtcggcacaaaatacaggtcataaagactttgctgataaaacaggttgcagtaaagaagccagccaaaagccaccaaaaccaagatggccatgagagtgacctctggtcgtcctcactgctacactcccaccagcgccatgacagtttacaaatgccatggcaacgtcaggaagttaccctctatggtctaaaaaggggaggcatgaataatccaccccttgtttagcatatcattaagaaataaccataaaaatgggcaatcagcatccctcagggctgctctgcctatggagtgtcattcttttattcctttactttcttaataaacttgctttcactttatagacttaccctgaattctttcttgtgcgaaatccaagaaccctttcttgggttctggatcaggaccgttttcctgtaacattaccaccctcgggctccaggtgtgggacagtgcagagggggacagtgagaagcccagagactgaagggggcgctgactccgcaggtcactcttagaccttaaagagtatcttctcccaccctagggaaggaacataggtgagggaagcagcgagctctgctctctctagcctggtaaaggtgtgagatgtgagcttctggaatgctgggcaggaggaactggggtgaatgatttgcagtcatgtttgccagttgcagaaccaggaaaaatgatcctttctttcctcgagtgctatcaagtgaactgcaccagctccattagcgctggaagcatccatatgaaattatggggcttatgatggctttgtctgggaaactgttcatttctgatcggaagttctattacacatgaatttaattctaaacagtgttaccaacagccccaaatgatttacattttaagcaatcttctttcattatctcataccttgacggggagcaaaagatggatttttatgggcttctatgatgagaaatgattaatgcccctaaatgggtgcctgtctctattccagccattctgacaaggggtccctttcctcaattctgcttcagtgggcatatttgaaagctgagatcaaagaaacggcatggagaaagaacattacaaacttttcttaagttggatctaaataaggtaaacatttccagtgagggcattgaacaccatttggtacctaacattgtctttcatccagaaagagagaggaaagagggagaaggagaaagtttgtccacttataaagccaaaggctgtagtgaaagcttgaaaatgtatgagaaagcccagacgcagcggctcacacctgtaatcccagcactttggaaggcctaggcaggtggattacctgaggtcaggagatcgagaccagcctggccaacatggtggaaccccgtctgtactaaaaatacaaaaaattagccagttgtggtggcaggtgcctgtaatcccagctagtcaggaggctgaggcaggacagtcgcttgaactcgggagacggaggttgcagtgagtcgagatcacaccactgcactccagcctgggcgacggagcaagactccatctcaaaaaaaaaaaaaaaaagaaaagaaaatgtatgagaagcaatttgagtttaatctttcagggtcagggagagagagggcactaccctccagacagatgcaaatctggaatgttgcctcccatagtgatgctgtaacgaggcacctcaaaggtaggaccagatgaggcatgccagctctcccgcctgctttacctctgcctttgggatcattctttccagggggcacctggacaaccagctcagaaacaccatgagggtaaggttgttggatgaactgctacaaggacacttttctggaaacctctgttcacgcaccagaatcagatgggacattcctcaagagacagattctcttctccagttccctgcagtgaattccttcccctcctcccgtcaaaggaaggggcgtctgtttgaggatcgtggcctgagtgagcccttgccattgaatggttggctgagaggctgagtcactgggaggaaaacgtggagtgagttgtgtctgagacctccccagagagaggggccactttagactccaaccaaatcatagcccaagttcccagcccaaaaggtaacaaagtaaacaagatgcaagaaattcaggtgctctgattttcaaattgtagaaaatatgcaaaaacagcctcagaaaaaaatcatctttgcagcatcagaaaccctgccttcctctaggattctgtggcttgggcggcctcagaggcactacccaaaaataaccaaccacaagtcaaggaaccagaaagcaaattgagctgcagaacgtgaacggcctccactcagagaagggggggtcatgtccttgaagcagggcccacggttaccctgagccccctagaacagtcctccctccccctacagttcatggtatctttagaatcaaggctacaaactgcatgaatagcgagtaattcaattaactctatagtctgtgatgaaaaaaagggccattttgctagctctagtggagcactagtttaaccctggtgctcaggaaattcccaggccagacagcatattaaaccagctcttcaacttaagaacaattactgtcatttatcagcctgaatagcaataatgcacaaatcgacacctttcaggaggcaaaaagctagcgaggtgtaatgatatgcaaagccacagcactctacattttgaactgtctccatcccatcaatacatctcctactacctacaatttatcaatacaaatgtggtacccaatgaaggcaagaccaagaagataaatatgaagagggtggggggaaaaaaggctcaggaatgtttgaattttaaaatgatgaagtacagatcacattcttaaaacattttacatgcaatgacccgatcacatcaagttctctcctgaaagaagaaacagaataaggggatttttctaccccaaggttgcaggcagatgcagctcttctcttccatttcccagatcatgtctttacgtggaagtgtgtgattctttaggtctctgataaaagtaaataaagatattgctaatcatagtgatgaattttcatagagcctttttcctaattactttcacatctatctttttttattttaatttaatttaattttttttttttttgaaacagagtctcactctgtcacccaggctggagtgcagtggtgcaatctcggctcactgcaacctctgcctcccgggttcaagcgattctcctgcctcagcctcccgagtagctgggactacaggcacgcaccaccacacatggctaatttttgtattttttagtagagacagggtttcgccatgttggccaggctggtctcgaactcctggctacaagtgattcgcctgcttcagcttcccaaagtgctaagattacaggcatgttattttaattttataatatcttcaagaggtaagataaatattatgatacccattttgaaagaaggggaaactgagacatgctgtgattaagacactctctacatcagtcagacactggcagagcaagggctagaaactgggtccggactcccagcctgtccctcaaaagtcacagcacatccagggcaaaacaaaggcttcccagaagtgctcatgaggatgtgcaggaacttcagtacatgtagcaccagtgggagtaggagccgcgaggcggggcagagcagagacaaacaattttacatttcaggccaggcctggtggctcacgcctgtcatcccaagcctttgggaggccaaggagggcagatcacttgaggtcaggagttcaagaccagcctggccaacatggcaaaaccccatctgtagtaaaaatacaaaaattagccgggagtggtggtacagcacctgtagtcccagctactcaggaggctaaggcaggagagtcgcttgaacctgggaggcggaggttgcagtgagctgagatcatgccacgaacctgggaggtggaggttgcagtgagctgagatcatgccactgaactccagcctgggccacagagcgagactccatctcaaaaaataaaacaaaacaaaacaaaatttcacatttcaaaaacagatgaatagaatttcaagtctgcagctcacacagactgagcccctactgtgcaccaggcgctgaaggaggcaaagacaatgccagcccagacccaggctctgcttgtggtcctcccctcccacatacccagccctccccaacacacactgacattttgcttagcagcatcatttagctggatagaatacatttactttctgtggagggaagccaagaagggtggtacctaagacaggaaacattcctacaaaggcaacagggacagggggtcccatgggagctcttaatgcaagtcaggcaaacaaggacctccttgttgaaactctgcacccactaaacactggtgcctcaaggagccccgagggttgtttaccaccgcagtcatttttatccttcaccttccacccatttcacaaacccatccaggccctcccagccgttttatcacagacgctcatcatctcagtccaggaattttgtttttgtttttgttttgttttgtttgagacagagtctcactctgtcgcacaggctggagtgcagtggcgcgatcttggctcactgcagcctccgcctcctgggttcaagcgattatcctgcctcaggattctcttgcctcagcctcccgagcagctgggattacaggcatgcgccaccacacctggctaattttgtatttttagtagagaccgggtttcaccatgttggccaggctggtcttgcactcctgacctcaggtgatccacctgcctcggcctcccaaagttctgggactacaggcatgagccactgtgccctgccctcagcccgggaattttgaaatggcgtccaactctagcatgcaaactcatgccctctctctaagcaatattttcaacctatttgaaaaggaaaatagtgattggtggtaaaatgtaaaggatttgtttgcttctatgtttctttggaagattagctgtttttttttaaatccacttatctttatttcttaaggtaatacctacctaatttttctttttctcttttttttttagagacaggctttagtgcagtggcatgatcttagctcactgtagcctcaaactccagggctcaagcgaacctctcgcctcagccttctcagtagctgggactacatgtgcatgccaccatgcctggctaattttttttacagacataaggcctcactatgttgcccaggcttgtctgaaactcctaggctcaagcgatcctcccaccttggcctcccaaattgttgggaatacaggcatgagccagtgcacctggcccctacctaattttaaatcatatacaacacacacacacacacacacacacacacaaatgaaacaaacatatcttctaaaagcactgagataatcatttgacgaatgacatctcatgtcttaatttttcaatgggtaaaggaaagccctaaacaaaattcttattttctgacatcaaataagaatgtgggtgcatttccctccctttataagaaattacaccttgctcttactattaaattagaataccctctcttcttttctaaaatttggctgctgtacaataaatacataaatcaaagagacataggatccagacgccaattggcagacggcactatgaaataagcaccaggacacaggcatgcggaagtgttacaacctgttccaatctgctccctgttcccccttaaaacaaaagaggaagagagtccaaaccctcctacacacacacatacacacacacacacacacgcacacacacatgcacagagcaaagtttaggaggtttaaatagagcctaagctgctaagaagaagagccacccaactgcttaggacctgggtttctcactcttgccgctgagctgcaatatttgccgcatcttgccaagtgaagatggtgtgaacctgtcatgcaactgctgagaagtttgggaaagcctggggttttgccagtattgttatcatcctcgtcctcattgccatcaggccagagaaattttccaagcccttgagcttggggtctttctcaacagccatgggatggtggccattagaattacctccaatattcatgtgacgaaatccattcagagatacaggggaggcagagaataggtgggtgtagcaattaggacacttttggttgcaagcaacagaaagtccaacctgaaaagggttgaggcaaaagataagatatgggctcatgtacgtgaaagatccaaagagtaaagtggcttggggcaggaatcagttagaaacctaccattcccaacctctcctactctgcttcctggggtaaccttcttccccaacataacacttggaccagcggaaaatgagttcaaaccaaagctcagaactgacactgattggcccagactgcattgacttgggtcatgtgtccatgcccgagccaatcactgcagccagagggatggaatgcatcgactggcttaaactaggtcatacgcgcctctctgcagcatgagggtaagatcttcaccaaagcatgtgggcagggagaagtgatgtgtgagccccaggcggcaaaaccaggaggactggtgttgggaggtcaaatgcaacaaacgcccacttcaagacgccatctttggtcagaccaaaaatctccaattccattgaccaagatatcgtacccagagttcactcgcaatttgagtagagaatatagccgcttacttgtgttgaatgtcctataccttctacatctaggctgaatatggcccctgcatcaccaaaatctgatggattcacataaaggactcctgaagataagttttgcactcaccagtgtccggtattttaatatctgccattcttgagttataaagctcaggccagaagattaaacagtcgctggtcaagaactaaagaaatgaggtgaactgcaggaccagtcacttgcactttatacatttttttaagtttaattaagattacaggtcagattaagtaatggctttctataagagatagataaacacagagacagttgcaccaagattgtttaaagaaaccacttaatttcaacttcaagatgttctttttttcatccattaaactgtatttgttgaaatataacatacctatgggcaagtgcacaagttgtaagtgtacacctcaattcttatcccaacataaacacattcaagtaactgctattgaggtcaagaaatggaacattactggtgccccagaaactcctttggaaccccctcctaatcagtatcctcccctttccacccaaagataactactgtcctgacttctaacaacgtagatgaattttgcctatttctggaactttatataaatggagttacacagcgtgtactcttatgcctggattccttctttcaaaagaaagtcacccaagttgttacatacagtacagctcattcatttttctgtttaataaatcattacgtggatattctgaaatctgcatatgcaatctatttgggattatcatttaggctattgttgtgaatgttcttatgcatatgcagacatttctgtttctgtttctatgcaggaggggaactgatgcagtttcacctttggtaaataaaggcaaatagtcttctgacgtgtatacaccaatttatgcccctagcagcagtaagaccttcctgaacaccattgcccactagttactactgccttgatcagttcagctctgttcctaactatgaccccactaaaagacgctatgtgtagagctcgggaagcagccagagctcaatttaaatcctggctttgccacttactagctgtgagtgtttctttggagaatttcacttagcctcagattcctgatctgtaaagggcctgtaagcatcatgttcttgcaagaatcaaattgtattttataaaccaaagtgctttgcaaactgttaaactgaatacccatgttaggtattagaagtgggtccctgaggccaatattacagtcaccaagtgttaagatagaattctccccacagcattagaaaggtagaccatagcaagttagaaagacctgggttactatatgacctttgaggagtcactcagtctctttgatcctcagtttttttatctgtgaaattagggcagcaaggcttacctgagaggattgtgaagataaaaagagagagggagagaaaggttgagagaaaaagagagagaaagagaatctaactgttgattaggtatctacaagtgctcaaataaccatggtcattattagtaaaagtctagaaaatatgggagaaaacctggttccctgaatccttttcactgatacgctcatctttcatgataaaggtgggttacatgaaaaattatcaattgataaaatttggcttttccgtttttgttttgttttctgcctgtttcacccatttaaagactcaccatacccaggctttcttaagatccacctccttaagaaaaacttgctatcaagcctggcgtggtggcgcatgcctgtagtctcagcaccttgggaagccaaggcgtgcagctcacttgagctcaggaattcgagacagcctgggcaacatggtgaaaccctcactctacgaatattaaaaaaaaaaaaatagctaggcacagtggtgcatgtctgtagtcccagctactcaggaggcagaggtgggaggatcatttcagctcaggaaatcaaggctacagttagccatgatctgccctcaagcctgggcaacagagtaagatcctgtctcaaaaaaaagagagagaaaaaaagcttgttatcgggaaaatgtgaaatgtcagcattcaataagtcaatcccagaatatcagagctagaagatacctgaaggcatacaacccattcagttcattgtacagatagtgaagctggggccagaaatctaaagtaacaccactggttagtggcagagccagagctaggtcctgacaaccagcccagggctcattctttagtagcttaataccaacgttaatctgtatctccagtgtaaataaaagaattggttctttcttaaagacctttcaagcattagagaaagagttcaatcacatgtaattgacccctaaattaaacaggccctgctaaaatttaacgcacagacatagacaaaaaccatcagtgtttatattttaaataatatctttcttttaaaaaattggagaactgcttctacccatgacagaataactgatatgagacttgccttcctgccaaaaataactataaaactagacaaacatatgaggcaactgttttcagacactgaacaacagacagtgcatcactgtaattttgagaaaaggcatacacatgaggtgagccccactgttcatctagctttctggctggaggcacctttctgtcaaggcacaaagatgggaagtccaaatggagcaatagttgcactgagctgaggaggtggagattggagtcctactttgttgaaatggctggattttatgaagcagaataacagagaatagtgatcttcacaaagaacatggggccttggctgcgggcacagaagtgcatgcagagtgagattccaggaagcctagcagaagactcctactatggagctgtgaatggtatggtgataccagaggtcatgcactgctaaaaagcactgaaattttggctaagccaaggtagagaaagttcactgaatgccccaagcctccagctgagaccttgaaaaggccatgcctttgggttaaggaccaaggccctaagtgaaggcaataccgtaagactcagctcaaaattaaaatatatctgaacaacaaattaagccaaccctaacagagcagaaagaatctaccaataatgttactgacagaacaaacattaaaactctttaaagaaaaatatgacataatttggaatctccacagtgcattattcacaatgtccactatgcagtcagaaattactagacatgaaaaggagcaacaaaatatgatccataattttttttttttttgagacagagtcttgctctgtcgcccaggctggagtgcagtggtgctatttccactcactgtaaactccgcctcccaggttcatgccattctcctgcctcagcctcctgagtagctgggactacaggcgcctgccaccacgcccaggtaatttttttgtatttttttagtacagatgaggtttcaccatgttagccaggatggtcttgatctgctgaccttgtgatccactcgcctgggcctcccaaagtgctgggattacaggtgtaagccacagcacccagcctataatccataattttttaaaagcattcaatagaaaatgaccccaagaataccctcatgttgaaactagtaggaaaagtctttcaaacagctacataaatatgtgttcaaggacttaaaagataaccataatgagtgaagaacagagatataaaaaaaaaaattttaaagaaccaaatggcaattctgaagctgaacagcacaatgcctaaaatgaaagctctgcataaacttaatataaaattagagactacaaatgaaagttaatgaacttaaagacaaatcaaaccagagaacacagagaaaaatatgggcgggtggggaataaacggaggctcagagacttgtggggaaaatacaagcagtcaaatagatatgtaattggagtcccaggaggaaaggaaagaaagaagataggaaaatatgtgaaggactaacaactacatttatataaattttgtggtaagtatgagtttatagagccaagaggtcaataaatcccaaaagacacaaacaccaagagggctacatctagatcacgtcaatgtcaaactgctgaaaatcaaagttaaaggaatgtctgggcatgtgattacacctgtaatcccagcactttgggaagctgaggcaggtggatcacttgagcccagaagtttgagaccaacctgagcaacatgtgaaatctcatctctacaaatatatgtataaattagctaggtgtggtgacacgtgcctgtagtcccagctactttggaggctgaggtgggaggatcgcttgagcctaggagtttgaggctgcagtgagccatgaatgtgacactgcactccagcctgggcattggagtgagaccctatctcaaaaaataaaaataaaaaacaatcttaaaagcagccaattaataaaggctcatagcttacagaagaacagtgatattaatgacagctgacttatcagattggaatttagatctataagaaggaatgaacaaccgtagagtggtaaatatgtgggtaaatataaaagaatacttttcctctgttaattttttagtaaaacaactgtctaatcaaaattagtaacacagtgtcatgggatttattaattattactaaaaatatgacatttttagtcataaatgtacaaaggatgattcagtaaatgaaccaaagcacaaaggatggttcagtaaatgaatttttctattgtaagggtcttatgctttacgtgaggtggtacaatattaactcaaaatagaccacgatgagttaagaatacacatcataattcctagagcaaccacctaaaaaaaaaagttacaaagaggtagagctctttgtaataaaatatataaaaagatggattacaatgaaaccaaagtacaataatgcaaaagtattcagaaaaggaagaacagataaatgcaaatcagatggaataactagaaaataaattgtgatatggtagacttgtagacagtcaatcactaaattaaatacaatggactaaactctccagtcaaaaagcacagattgccagataggattcagaaagctatatccaactatatgctgtctacaagagacattttaaatgaaaataaataggttaaatgtaaaaggatggaaaaaaagacaataagcaaacaaaaaagctagtttgactatattaatgtcagacagacttcagaacacagaatataaacacagataaagaaggacttttatagcaataatgatttcatagtgaaaaagataatttatcaggaaaacataacaactcaaaatatgttacaaacaaatgtaacaataatatatatagttatatattattatatatagatatataacaatatatattgttatatatgttgatatatatatcaacataaatatcaacatgatatatatatcaacatacatatcaacatgatatatatatcaacatgtataacaataaataacaaaccttcaaaatacatgaagcaagaccaaacaaaactaaggggaaaatagactaatccacaattattactggagattttaacacttgtctcttggtaatcgctagaacaattagagaataataataaatatatagaatatttgaagaacattatcaatgaatgtgacctaattgacgtttttagaacactgtacccaacaattgcaaagtgcatgttgtttttaagtgcacctcgaaggtttaccaagaaaaatcatattttgggtcaaattgaaatctcaataaatttcaaaacattgaaattttaaagatttaaacaattaaatctttaaacaattaaatttaaagatttaaacaattaaaatttcaccacaatcaaaaagctgcaaatatgtataaattcacaacatgcttcgaaataatgcatggattaaagaagttacaaaaaaaaaccttgcaaaatatttaaactaaatgataatgtgttcttacacagcatatgaaagtttgtgggatgctgctacagcagtaattagagaaaatgtatagcctttaatgagttatgttagaaaagaagaaagttttaaaatcaacaattaacgtttccatcttaagctggaaaaagcaaattaagtttaacccaatgtaagtacaaggaagacagtaataaagatgtctaataatgtctggtaataatgaagtcaaaagatagacaaatatttgagaaaattagcaaaaccacaagtgtctttgaaaaaaattaacaaagttgatgaatcccaagaaaaactaagaaaaaagacacagtaaatacaaattttcaatatcagagatgaaaaggaggacatcactacagattccacgcacactgaaaagataacaaggcaagattatgaacaacttaattctcgtatatttgacagtgtatatgaaatgaacagatttattgaggattttgattcatcaaaagggatattagaagaaatagaaaatctgtaaaagtcttaattccattaaagaagttgaatttgtaatcaaaagcaaacttgaggactaatggtttcactggtgaattctattggatattgaagaaaagaacaatcccagtcttacataaactctctcagaaaatagaggatgagagaacattccttcacaagttttgtaaggataggagaatactgattccaaaccttacaaagaaattacaagaaaggaaaattaccagccaatattctttataaacacagccacaaaaattgtcacaaaatattagaaataaaattctgtaatataaaaagagaataatacatcatgaccaattagagcttttcacagaatttcaggttttttcaacagtcatatataaatcagtgtaatgcacaatattaacagaaaaagggaaagaaaaaataatctgactaaatacaaaaaaaagaactatcaagaatcaatatccctttgtagaagaaataaattttaactagaaaaacaaaggaacttcatcaatctgataaaggacttctgataaatctacaaccaacattatgcttaagggtaaaatactaaatatgttcccctaaacattggaaacaagacaaagaaattctctcctaccatgtctattcaacattgtcctggagatactagccagtgcattaagaaagaaaaaagccaagatcaaaaaagaagtaaaactgtattcatttacagatagtatagtggtttatacagaagaccctaaggaatctacagaaaaattgctagaacatcagtaaacttagcaaggttgcaaggtaactcagtatacaaaaataaatagtatttctatatactggcatcagcaaacaattggaaatgaagtttaaataatttcagttatattttacatttttgcattaaaaatataaaatgcttaaaaatacatgaacaaagtaagtacaagatctttgaaaacattaacaagagaaattaaagaagtaaaggtcaatggaaaggtgtaccatgtttatgaattggaagactcaatattggttgacttctagtactggaggactcagtacaaaaggctcaacaacaatatataacttcaatgcaatcccaatcaaaatccacagactaaattcattactgaaatgaaaagaatctgtaatagccaacgttgaaataattgaaaaataagaacaatgttggaagactaatactatctaattactaaactagagtaatgaagacaataaggtattagcattagaatagatgaataaatcaatggaacagaatagacccataggtactgattttcatcaatgacaccaaggtcattcaatgagcaaaataaagcatttcaacaaatagtgctgaaagaactgaataaatatatggggtaaagtgaacctcaacccctacttcacactatacacaaaaaaatcaaattgaaacagactataagcataaatataaaagctaatactgccaggtgctgtggctcacacctgtaattccagcactttgggaggctggggcagaagaatcacttgagcccaaaagttcaagaccagccacagcaagaccctgtttctacaaaaaaaaattaaaatattagctgagcatagtggcgtatacctgtagtctcagcacactgggaggctgagatgggtggatcacttgagcccaagagttcaaggctgcaatgagctatgattgcaccactgcactccagcctgggcaacagtgtaagagaccctgtctcaaaaaagtatagttttataaatactataatatttacaatattatagtaatactgtaataatataatcggagaataattccatgacctctggtagacaaacatctcttagagaaaatacaaaaggcactcactttacaagaaaaaatgattaacaaattgaacctcgtgaaagttaagaatttctactcatcaaaaattgctgttaagaaaatgggaagacaagccacagactggggaaaaatattcacaatttgtgtatctgacaaagcacttgtatccaaaatacataaagaacttaaataaatcaaaaataaaagatttgagcagacttttccagaaaagatgtttaaatggccaaaaagcacatgaaaggtgctcaacatcattaatcctctaagaaatacaaattaaaattacaatgagatagtacttcacaaccactaggatggctaaaattaaaaagactgagaataccaaatgttggccagaatgtgaaacaactggaactctcatacattgctaatggggattaaaatggaacaaccaattaggaaaactagcagtttcctggaaatttaaacatacacttactctatgacccagcaattccactttcagatattctcccaagagaagtgaaaatgtatgttcacacaaaacttgtccacaaatgttcatagcagcttttgtcgtaacagccatacagctggatacaaccccaaatgttcatcaacagaagaatggataaacaaactgtggtgtattcatgcaatggaatactactcagttgatatgtacaataacatggatgaacctcagaaaccgtatgctgaatgaaacctgccaggcacaaaagggtacacgttatgtgattttatttatttgaagttcaagacagatcaaagcaatctatcatgatagaaatcagatccactatgggtggtgggaatttgctggaatggggcacaagggaactttctggggtgagggaaatttccatatctttttttatgtattcaagggatacatatgcaggtctattaccagggtgtattgtgtaatgttgggcttctattgaacccatcacaaaaattaactcaagttggattaaaaacttaaatgtaagacctcaaactataaaaatcctagaagaaaatctagaaaaaaactcttctggacattggcctaagtaaagaatttatgactaagccctcaaaagcaaatgcaacagaaccaaaaattgacagttggtcctccattaaactaaagagcgtctgcacagcaaaagaaataatcaacagaggccgggtgcagtggctcacgcctgtaatcccagcactttggcaggctgaggcgggtggatcacgaggtcaggagatcgagaccatcctggctaacacggtgaaaccccgtctctactacaaaatacaaaaaattagccgggagtagtggcgggcgcctgtagtcccagctacttgggaggctgaggcaggagaatggcatgaacctgggaggcggagcttgcagtgaaccgagatcgtgccactgcactccagcctgggggacagagcaagactccatctcaaaaaaaaaaaaagaaataatcaacagagtaaacagacaacctacagaatgggagaaaatatttgcaatctatgcatccaacaagggtcgaatatctagaatctataaggaacttaaacaactcagcaagaaaaaacaaatagccccatatcttgattgtggccttggttccagctgtatggttttgtcaccacttgtggaattgtacaattaaagtatgtgtatttcactgtacacagactttaacttcaatttaaaaaatgtaaatacacattccacttgtactgaatcttgctaatgcaagactccagcgccttactaagtctcaacggtgttttctgaagttcccggagtagactatgtgtgctcatgaacaagtccttcaggcttccgtgcagcccctgctgtcattgtggcttctgcaggctcctggggcttcccaagcatccctgactttcctggcctggctgctgcctcccttccactgcagtctcccctgtctgttagatctggctcctcacaccaaaaaagctgtggttatttatctgtgatgacaagcccctagcaggtcactcataactctcagtagaagactcccaagcagtgttactgtgagagttctgccaccatagtcatcatgtttctctgttgttggccccaatgtttgatcgattttgctgttattaatattgtttttctggaaaactgctctttcagctttttcttttttttttttattattatactttaagttttagggtacatgtgcacaatgtgcaggttagttacatatgtatacatgtgccacgctggtgcgctgcacccactaactcatcatctagcattaggtgtatctcccaatgctatccctcccccctcccccctccccacaacaggccccagagtgtgatgttccccttcctgtgtccatgtgttctcattgttcaattcccacctatgagtgagaatatgcggtgtttggttttttgttcttgcaatagtttattgagaatgatgatttccaatttcatccatgtccctacaaaggacatgaactcatcattttttatggctgcatagtattccatggtgtatatgtgccacattttcttaatccagtctatcattgttggacatttgggttggttctaagtctttgctattgtgaataatgccgcaataaacatacgtgtgcatgtgtctttatagcagcatgatttatagtcctttgggtatatacccagtaatgggatggctgggtcaaatggtatttctagttctagatccctgaggaatcgccacactgacttccacaatggttgaactagtttacagtcccaccaacagtgtaaaagtgttcctatttctccacatcctctccagcatctttcagctttttcttagacccatctttcttcccaagacgtgtggcggctggaccaggaccagtgatgagcaggagacaatctactgtccttaagaccacatctcactccagggctcacagcctttcaaggtcttcctttgcaatgacatccctgccccaccccacctcttgagaagacagaccatcctggaccctctccttctcccatatttcgatgtggatacccaaggagagctgatgtgctctttttcttaattttttttttatttcagtagctttaagggtgcaagtggttttttgttacatgggtgaatttgatagtgatggagtcggggatagtggtgaagtctgcacccatcatctgaattgcacattttgtacccaataggtagtttttcacccccaaaccccctcccaccctctccccttttgagtctccagtgttcaccatatcactctgtctgcccttgtgtacccatagcttagctcccactgacaaatgagaacatgcagtatttggtaactcctgagttacttcccttaggataatggccccccagttccattcaaattgctacagaaggctttatttcattcttttttaaggctgagtagcataacacggtgtatatataccacattttctttatcctgtgattggttgacggatgcttcagttgattccgtatctttgcaattgtgaatagtgccgcaataaacatacacgtgcaggggtctttttgatataatgacttattttcctttgggtagatacccagtggtgggattgctggattgaatggtagatctgctcttagttctttgagaaatcaccataagctctctcacagaggtgacactaatttacgttcccaccaggagcgtataagtgttcacttttcaccacatctgcctgttgctgttgcccgtcccactagacctctatgagctcctcttatctcacctgagaaaatcttatactccttcctattattccccagtttttagtaaagttcgttaaacacaagtttatgctagcagggctttggggaaatgagaggaagcctgtccactttgccccatgtgtaaactccagacctctccccatttctcaaagccttccaagcatgaactgagtgtttcacaaactttacgaaagactggggataataggagggaacatacagcagaagaggaaaaatttaacattggacaccagatctcttgattccatcagccaaaatcttttctccagggatccctgattccctggaagatgacacactgcaggggtcctctgtaatcctctttctcccctctacccaagttttgtcagggggattcaaaagcaaacaaaacaaacaaaccaaagatctctgttaatattgcgtgatctcagtgagaggaggccctgtctgaagtctgtgcatctcagttacccaccgtgctttgacccccagtgcttcagggcccctcactgctctctacctcaaagttgcagacacaagctgctgggagttctcaatggacacatagagtctcttcccacttctccaacccctcagcttcaggcatcactgggttgaataaaccttggtcctctcgactccttcccactacctctctgccccgggctgcactaggctcccaagtcagacagccggggctgcagcccctatcccttgcaatgagtcttctccagggagggccctcattttggggtatcaagagtgtccacagcgtggatgcagtgaacaggtaacacttatacactgctggtgggaatgtaaactagtacaaccactattgaaaacagtgtggagattccttaaagaactaaaaatagaactaccatttgatccagcaatcccactactgggtatctacccagaggaaaagaagtctttatatgaaaaagatacttgcacatgcatatttatggtggcacaattcacagttgcaaaaatgtggaaccagcccaaatgcccatcaatcaacaagtggacaaagaaactgtgagatatagatatatatagatatagatatagatatatataatggaatactacacagccataaaaatgaatgaattatggcatttgcagcaacctggatgagattggagactattattctaagtgaagtcactcaggaatggaaaaccaaacatcgtatgttctcactcataagtgggagggagctaagctatgaggacaggacacaaaggtataagaatgacacagtggactttggggactcagggggaaagggtgggaagggcgtgatggataaaagactacaaattgagtgcagtgtatactgctcaagcgatgggtgcatcaaaatctcacacatctccactaaagaacttactcatgtaaccaaacaccacctgttccccaataaacaatagaaaattttttttttaaattttaaagagtgcccacaggacacacacatcttatgcttagccttgaacatccaatgcccctatttcaataactaccctgttgatgtttgcattgctatggctgtgtccattttacctcacaatcaattttagatgattgcagaaccaaagcaaatgatttgcagtagggtttggggtttaaaggtttggtttaaaggtttggtttggtttggatagagctatgctctatcgttgggttttcaatgagtagctaggtgacctcaggcaagctacagcagattaccttgaagttacttcagcaagttaccccactatgcctcatttttcccatctgtaaaataaggataataacaggatcatggggtggggtgaggattaaatgagttaatatgtgggaagggtatataatcgaacagtgtctgcaacagagtaagtgctatttaaacgtttgttacataaattatgaacattatataaattgtcttcatggacttcaaaagcaggacatgacatacggtgggaaattagttgaagaaaccaaaacttgtatacgttcttttagatacgccacttgtgtgaatatttttaattcagctaaggggtaaattatatagatgtgcccacaaggttgcttttagcttagtcaacaagagcagaagcttcaagatggcaaataaaacaacatccaagacaacgttgaaagaaaggtgaatgatataattggggtcaagccgtcttcaattgagggcactctcttggctccacttcccctcactgtaagaaatacagctggagggataaatacaaggacacaggccccaaagatgtctgagtggccagagaagagagacccccaaggctggcttgcaggctgcggggctgggggcggaggcgggggaaggaccttcctcggtgtcctcttatgaggcagaggggaccagactatccatcacagcatcataatgcttaagtggcatgaagtcgtaaagcccacaacgaagcagggatgctccactgccagcggaatctctctctctctctctctctctctctctctctctctctctctctctctctctcttttcccttcccccagtccctccccaacccaacagtggaggcaggaggccctgagcagccagccctccagctcagtcactggtcagagggatctcctgaggatgggctctctgccctgcccaacaaggctacaaagtccgggagaaagcaacgtcattcgttcattcatccactcattcattaattatgtactgagtgcctatcacgtgtcagaccctgccccaggcattggaaacatcagagactcaaaccaaaatgcagtacaggccagctgtggtggctcacgcctgtaatctcaacactttgagagactaaggtgggaggatcgcttgagctcagaagttcgagaccagccttggcaacatagtgagacctcatctctacaaaatatcaaaaaattagccaggtgtggtggtgcatacctgtggtcccagcaactcaggagtccgaggcaggaggatcgcttaagcccaggaggtcgaggctatggtaagctgtgttcacaccactgccctccagcctgggcaacagagtgaaaccctgtctcaaaaaaaaaaaaaaaaaactgtagtacaaccgcatagtgaaatattatccagcctgaacagaaaggaaattctgaaacatgctacgatgtggataaacttcaaggacattatactaagtgaagtaagccaggcacaagaagacaaatattctgtgattccacttatatgaggtccctacagtagtcagttctatagacagaaattggaatggtggttaccaggagctgaaggcggggtgaacaaaaagttactgtttaatgcaatggtccccaccccaacttttgtggcaccagggaccagtttcatgaaagacaatttttccactgatggggcagagtgtgtgaggggggagatgtttcaggacgaaattcttccacctcaaatcatcagacattagttaaattctcataaggagcacacaacctagatccctcgcatgcacagttcacaacagggttcacgctcctataagaatctaatgccactgctgatttgacaggaggcagagctcaggcgataatgctcgctcgcctgcctctcatctcctgctatgcggcccatttcctaacaggccacggactgataccgatctgccacccaggggttggggaccccggtttaatggtacagagtttcagttttgcaagatgaaaatagttttggagatgatggtggtaatagttgcacattgcataacaatgtgaatatacctaagaccactgcactatacacttaaatattgtcaggatgataaatttagcgttatgtgtatttgacaaccttttaaagcaaaacaacaataattatgatgaaagaaggtggagcttgagtaagcacttgaaggaggtggtgcgattagccaagcagtcccctggggtaacagcagaccaggcagacggaagcaaaagggaagaaggcactgaagtgggaccatgtgcttgatgtggtgaagccactgcatccccccagacttcatgccacgctggtgacattttatgcagagcacagagagttaggagagagaacagcactttgtgctccacaaaggaagaaggtccttgagctataagccccagaggctcagtggactatgttgatttcatcagctttggtgataaataagctttgtcattccccagtctgctaataattgggtctcagacaaatcagtgatcaaactttaaaagacagtctgtgaaccactaaatcccacagaagaacaattgcacaaaagtttactgtagccatatgaagggaatttttatgaaccttttaaatctgctgatatacttgggaagcaagcgcatcggtggtgcgtttaaaagtctatgtggaagtaaacattttacggcatgtttgggaggaagggaaaagttagccaagattcatatttttctagggcaaatgaggtcatgcactgggttgtggctgatcttccctcccatgggatcctgtaaagattcgtgaaggccccagacactgctgttttgctactcccggagatttgtgggatttgggttaaacgcaatagtaagcattcttcctcaagacagtccaggaggcaacagccagaagatggcgccgtagctacggaaacgaagacaacagtgtccatgcgtgccctcccacagcctgaggacttgggacccaggaactgaggcagatgcatccagaacgaggctggaccttaatgcccaactggggtctaagcagcggtccccaagcttggttggcacagtggctcacacatgcaatcccagcactttgggaggctgaggtgggaggatcgctggagcccaggagttcaagacctgactgggcaagacccgggtctaagcagaaggcaaaaagagaccccttcttccttctcctgatccacagccctgcctggagctttcagcagaagcgtaataggataccagagttgctctgtgtttctgtgtggtctcagcgggaaggcagtccttgttcaagtggacattcgccatttagactgttaaaattgcttcttcctctcagatcctggttttctttaaggcacttgtgtccccttgtccgggcttgacccatcaggatccttaacccaggccctggagggagccctctcattgcagtcctggtgtctggacttgcggctaccacaccacatgatgtctcaagccaccctgcttcctctgtttttcccaagctttgttctcttgcctctcttgagttgtctggtaaccttccagtaaattgccaacgtgctggtactcactggaatttgttgcagttgcctgtcagcgaagaatcttgatgggtaaagatgggtatagctccaggatgtgctactaagacaagcatcagaagtacttgcaccacacatctccaggcaaacactctgcctccagaggtccgtgatggttaatactgtcaactggattggattgaaggatgcaaactattgttcctgggtgtatatgtaagggtgttgccagaggaaattaacatttgagtcagtggactgggagagggagaccaccctcaatctgagtgggcaccatctaatcaactgccagcgtggctaggataaaagcaggcagagagacgtggaaggactagactggctgagtcttccagcctccatctttcccctgtgctggatgcttccttcccttgaatatcagactccaagttcttcagcttttagacccttgaactcacaccagtggtttgccaggggctttcgggggccttcagccacagactgttggcttccctacttttgaggtttgggactcaggctagcttccttgctcctcagcttgcagacagcctattgtgggacttcaccttgtgatcaagtaagtcaattctcctaataaactctcctttatatattcatctatcctgttagtcctgtcccttgagagaaccctgactaatacaaggtcctactgaaaaatggcctactgaatggcctactgaaaaatggtcaaataaagccatgaggaactatgatttcattatttcaaaagacagaaataatccttgggattctaagccttcacagagacagaggatagaccctatgctcttgctaggaccctttcccaagcaggattctcaggttagaagtgtcaggagccatcaaaaccaaaaggctactgtgcagaatcctagatttacttttattttattttatttttattttattttaattgtagtaaaacatacatgacatacaacttaccgttttaactattttttaagtctaaaaaatggcattaagtacattcatattgtgtgcaaccatgaccaccatgcatctccagggttcctttcatcttccgcagttgaaactctgcacccactaaacgctagttcctcattcctcttccccatctccaggcctgggcaaccactattctactttctgtctctatgtatttgactactccagatacctcatataagtggaatcatatagtatttgtctttttgtgactggattatttcacttagcagaatgtcctcagggttcactgatgttgtagtatgagtcaaaatttccttccttggctgggcatggtggctcatgcatgcaatcccagcactttgagaggtagaggagggaggatagcttaagcccagaagtttgagaccagcctgggcaagatagggagaccccatctctacaaaaagtaaaaaaatgaggtgggtgtggtggcgcatgcctttggtcttagctactcaataggctgaggcagaaggatctcttgagcctgggaggtcaaggctgcagtgagccatcattgtgtcactacactcagcctgggtcacagaatgagaccctgtccccccgacccaaaaaaaaatcctttctattccaagctgaataataatcccttgtacagatatatcacattttgcttgctcattcgtctgtcaatggacacttgagccacttccaccttttggctattaggaagaatgctgctgtgaacatgggtgtacaaatatctgcttcaggccctgttttcagttcttttggctgaatttactcttgaaggcagctgaatgtgagttgcacagccttgccattttacaggcaatctacttgaataatgtctatctgagcacttctcatgtgcagggcactatgacaggctcaagggacaacaagatggatctacatgggcatgggtccttccccaggccccaccacgaagagaagagtctccggcacagaaacgtcaggaatgatgcttacccagctcccacaggatcccagacaggagtgcaagtagctcctctaggagctctgagaacagaggggctggcatgagctggcggggcactggggatgggccatgaagggtgtcaggacatggagcagcaggaaccacccttctcgtggtaagagcctgattgtcccattagacaagctccaagataggcctttcaaaggctctcacctggagtgcccaaggaggcttctgccttgcaccctcatgggcaaggactttacatgtggtcttgaaggctggcagcaaacctcccagtggatgtgatcttgggtaagttacctatctcacgttaagttgactgagcctctatcacctcatctgaaagctcatagagcgattgtgagaactcagtgaaatcatgcgtgttaatattttagctcagtgactggccttaggaatgccctgacacagcattgactatttctctctaacctactagctccatctgagcgagaattctgttttgctcatcactgtatccctgggaactagcatagtgcccaacacttagtaggtacatagtaactattatcaaattttctaatcttcacatttaagccaccaaaaaaaggtaggcataggtgaatttacaaaacaaagtgtgttatctctcagcaaaaaatcaccctgctatgcacacttctctagcactggggctagatgcctgaaaactgcattttccatattcttttgctagctgactgactttgggctaggtttcactaatacaaagcgctggggataaaaatgaaaggcatgagaaaaggtgaaactattttccagacgcttctgtggcagaagtagcagtagcagcagtggaggagggtcagcagggaaggggacagtagccaaggcaggaacagttgtgatggcagcagcaggccagaaaatgcaggctcaggttcctgctcaggcagctcatccttaacagccatggtctcaggggcatccagccatgggattgcagcttccatagctgttactcattgggtaaattcactgcaccttttttccctcctgtcacttttctgacacctttgtaaccaactccttagattaaatgccctgttttgaaagacctggggggtgtctgactgatgggatttgaactgatacagttaactcattcttggagcaagtgtctaggggagtcagggcagcccttctcccacggccattctagcgatggtcccaccttttcatctctgcacaggagaggctgttatgaagaagcctcacagtcttccaggccccacctgagacatgccaattcacatggttaggctggttgttcattgcacagaagtgccctgctaagggtacatgcgtagctgagacctgttctccaagcctgtgcccagactgtggcactcaccttgtgggtgagggaggcctttctctaagatatacataggtagatgataaccctgctgagacaggtggggccagctcttttccaaaaagctcaaagcccctagcgccctcccaaacacccgcagggtcgctttctgggctgactcggacatttcagaggaaaagcatttcggtcaggattaaagaataattccacttaggcagaggccaggccagacttaagcaaattccagacacagcagagcttctgatgcggcctcaaacctggctctccattgctcaaaacatctccaggcctccctcctattgtgtatgagtttccactgggaaattgacctatttctgccctcacaaagctcctcagcagttggacctgcagcagccagaaatctgtctccatgtctcctcttactaaatgaagaacccagaagactgtaccaagccccccctccacctcaaatcactagctccccaggctgggccttggtagcacccactgttttccaggcatctgtgtccacactacatttttgaagggcttcaggtgcctctgataaaatgctatcaaatgaaaaaagccacccatctttgggctccctaacccttgcagaactcaacatttcttttcctgttgatggggagaagcaacaccacccactgagttcactgaaaccgaggcttccatattcccgcaggagagtgctcgtatgcttaaaaccctcgccatatgtgtcgatttaaatggaaaccaaacggggaaggattctgacgacagtctgtcactgactggagcgctacttcctccagttaatttatgtcttccgtaatcacattgaggctttttaaaaggctctacctgtgacggcattttttttcccccatacgttcacattcaaaggtccctggcccatgcgctaatcgtcattttaagacacctcacgctccgagcactttatcttcccagctctttacctgtattaattaattagtgctataaatacaaccagcacatgactactctggagctaatcagtcactgacacggctcaggacctggaggaaaattaggaaaattgaatctttccaaaagttgggcctatgcgaggtaacttagtcaatcgtgtcctgagggtcagtggggaccaactgatttaggctccgcctgggtagaaaagcaatttcctgaacagcaagtcagcaacgctagttaaagtgattctgacctgttataagtaaagcatgaattctgttttcctgctggttgggtgcacgaccacttactgagggcctggtgctggcacagccctcatcctcggctgtacaaggaatgtcagaagacagtgtcaggcctttcccactacctttttatggtggagttaaagagagccaccatgcattctagggtttgaaacatcaatcccaaaaaccaagcaagggaaatcaggggacttggggttgacataaagtattagagattctctgagtcattcaaaaaaatattgaacatctacgatgtgttgcatggccaagacgctaagatacttgatgtctattctttcttttacttatttatttgagatagggtctcactctataaccgaggctggagtgcagtgatgcaatcatggctcactgcagcctcgacctccggggctcaggtgatcctcccacctcagcctcctgggtagctgggactacaggtgcacgccaccatgcctggctaattttagttttttgtttttttgtttttttgttttttttcgtagagatggagtttttgccatgtttttcaggctggtctcgaactcctggactcaagtgatctcctaccttggcctcccaaagtgctgggattaccagcctgagccacgttgcccagccttgatacatatttttaaagggcttacagccactgaggaagacagatttgcaaaccacaagaaacatacccaagaatccacaatgctcagaattcaaggtgtagaatatccaacaaaaggatattcttttttttttaatattttatttccttaggttattggggaacagatggtgtttggttacatgagtaagttgtttagtggtgatttgtgagatttgggtgcacccatctcccaagcagtacacactgcacccaatttgtagtcttttatccctcatccgcttcccaccctttccccttgagtctccagagtccactgtgtcattcttatgcttttgcatcctcatagcttagctcccgcttatgagtgaaaacatacgatgtttggttttccattcctgagttacttcacttagaacaaaaggatattctaaactgcccaatttatctggtcattggcctgcctagaaaggaggctggaagaaaagaactcttgattcgatcataggcctcgaggactcttcttagtgctatccagcactgtttatgtttagcttgcaccttcactctgagtttctgggtccaaattccgggtttggccctggggagttctcctccacactaagctttggcctggcctacagacctcttgtcctggggctggcctccttgtgggtcacaggcaaacagggctaaatgggagtgagatctagtgagactgaatccctgaggctgatctaggaacctcatttctctagctcagtttcttaatttcttgttaactgcaaaataaagagctcatctcacgcagagttttcacatgaaacaggagctgcaggctgttgtttatatctgtgagtagatcacagatctactgcatctcaaaaaataaataaataaataaaaatcaacaacagtgttaagtttagtttaaaagaagccttgaatgtacagggtgggagagctggattctgcctgattagggtggagagtggagggggtgggcaggaggtcaagaggaattttggaagaggtccatttccaacaggcagggttaagcagtgctaggggagggaacactgcagggtacaggaaccaatgtgggcaaggacaggaatgggcagggcatgctgaggagtgatgagtgggagcccactttcaacacccatcccgaaaaggctctcggacttccgcactttatagatttcatttcctccttcagtgtcccaatccctcattcctcacccagtcaagtgtcttacaacagcagtgaaagcagcgacaggtttccctgggagccagcctgcagggaaatgatctctttatgtctcctgtggcttcctgcccttctgcactctcatggtccagctctattctgaggcagtccctctgggtggctatgaataggtgtgttttattcttgcatccttggtgcgacaagccaccctccgatagtttgcttctgctcctcatgaaagagtccaaaatgtccaaagacaagggttccacccatccacatagaaggaaaagtcctacgactggacaaaggcattctgagcaggtacaggttgaagactgtgaaattgaccaaggaaggtgccaatttgaattttcttaaagtttttcactccactgtaacaatgtattctcaggcgagagggggctctagacaccaagtggagcttgtgagagacacccattgaggctgttcaggaaacagacaccacagcctgcctgtggatgcttcctcaaatttcaccttcttggaaaagacaccattctgttggtgcacagccaaggccgcctctgctttctggaaggtgactctctcttttagggatctttaggaatcccagcaactgccctgtgctgtgcacaaacctcaacatccaccaacacacagaaatcctgctacctcctggccacttttctattccacatcccatagcaaaaaaatttattgaagtaggattgacaaacagaaattgtatatatttaaggtatacaacataatgattcatatatatatttatatttatatatatatatacatatagtgaaaatatttccacaatcaagctaattaacaaatccatcacttcccatagttacccttttgtgtggggggttgggggggtgagaacatttaatatctactctcttagcaaatttcaagtgtgtgatacattattattaactagtcaccatggtgactatggattagtctatggttagtcaccattctgtactatggtgactatggatagtcaccatgctgtacgttagatccccaggacttatccatcctatataactaaaattttataccttttgaccaatatctcccccttgctcccacccctctagcccctggtaagcaccattctactctctgtttctatgtgtttaacttggttagattccacatataagtgaggtcacgcggtatttgactttctctgcctagcttattcacttagcataatgtcctccacattcatccatgttgtgataaatggcaggctctccttttttaaggctgaataatattccattgtacgtaagtatgtctgtgtacgtgttgtatgtgtatgtgtgtatacacatgtgtatgtatatacacatacaacagacatacatatacacattgacatacaagacacacacagcagtttctttatccatttaactattgtcttagtcttttttctcttgctataacaaaataccacagactgggtaatttacaataaacaaaaatttattggcttacagtttgggaggctgcaaagtccagtatcaaggtgctggcatcttgcaaggaccttcttgatacatcatcccatggtggaagagcaaaaaggcaagaatgggtgagagaggcaaaagaaagcccaactcatacttttataaggaacctgctttcgcaatgataaatctactcccaagatggcagcattaatccattaatccaatagaatcctcatggcctaataacctctcattaggccccacctctcaacactgttgcattggggattaagtttccaacacatgcttttccaacacattcaaaccataccaactgtcagtggacacttccagatcttggcttttatggataaagttatttccagatcttgacttttatggataaagctgcaattaagtgggagtgcagatatctctattaggtcataattttcttttctgtttttttagatggagcttcactctgtcatccaggttgtagtgcagtggcacaatcttggctggctgcaaactccacctcctgggttcaagccattcttctgcctcagcctcccgagtagctgggattacaggtgcccaccaccacacctggctaatttttgtatttttagtagagtcagggtttcaccatgttggccaggctgatctcaaactcctgacctcaagtgatctgcctgcctcagcctcccaaagtgctgggattacaggcatgagccaccgcacccagccaacgttgtaattttatttctttctgggtcatatagtagttccatttttaattgctttaggaaccttcatactattttccctaatggctacaccaatctactttcccactaacaatatacaagggttcacttttctccacattcttgccaacacctatctctgcctttttgataatagccttcctaacagctatgagataatatcttatcgtgattttgatttgcagttccctgacagtgatgttaagcacctttttatatgcctgttggccattatgtcttctttggacaaatgtctattcaggtcctttgcccattttaaaatcaggttatttgtttttttactattgagttattgagccctttatatattttggatattaaccctttatcagatatatggcttgtaaatattttctcccaatacatatgctaccttttcattttgttaattgtttctttactgtgcagaagcttttcagtttgatatagtcccatttatttaattttcttttatagcctgagcttctggtgtcatatccaaaataatcattgccaagacccatgtgaagaagcttttcccctacattttcttttaagagttttatgatttcaggccaggcgcgctggctcacgcctgtaatcctagcactttgggaggccgaggcaggtggatcacaaggtcaaaagatcaagaccatcctggttaacatggtgaaaccccatctctactaaaaatacaaaaaattcaccgggcgtggtggcacgtgcctgtagtgtagtcccagctactcaggaggctgagacaggagaatcacttgaacccaggaggcagaggttgcagtgagctgagatcatgagatcatgccactgcactccagcctgggcaacagagcaagactccgtctaaaaaaaaaaaaaaaaaacgaattttatgatttcaggtcttatgtttaagtccttaatccattttgagttgatttttgtgtatggcataagaataaggattcattatcattcttttgtatgtgaatattcagtttctccagcaacatttaatgaagtgattgtcctttctcattgtttattcttgttgtttttgtcaaagattagttgatcatatacttgtgagtgaatttctgggctctctattctgttccattgatttatgtttctgtttttatgccagtaccatactgttttgattactatagctttgtaatataagttgaaatcagaaagtttgatgcctgcagctatgttcttctttcttaaaactgctttagctatttgggatcttttgtggttcctacaaatttaagattgttttttatatttctatgaaaaatgccattggaattttgatagggattgcactgaaattttaggtcactttggatatatggacattttaataatattaattcttccaatgcataaaacacaggatatctttccatttatttgtgtcttctttaatttctttcatcaacattttatagttttcagtgtacagatctttcacctccttggatacatttagtcctaagtattttattctttttgatgctgtcataaaaggaattttttttaatttctttttctagtagtttgtttttagtgtatagaaacaattgatttttgtatgttgattttgtattctgcaactttacttaattcatttattctaacagttttttggggatgtctttagggttttctatatataaaatcatgtcatctgcagagaaaatttaacttcttcctttctgatttggatgccttttatttctatttcttgcccaagtgctctagctagaatttccagtactttgttgaatagaagtggatagagtggacatccttgtcttattcctgatattagaggaaatgattcagcttttcactgttgagtttaatgttatctgtgggcttgtcatatatggcctttattatgttgaggtgcattccttctacacctaatttgttgagagtttttatcatgaaattatgttgaattttgtcaaatgcttttttgctcttattgagacgatcatatggtttttatctttaattctgttaatatcatgtatcacatttattggttcgtgtacattgaactatccttgcatcctggggataaattccatttgatcatggtatatgagtttttgtgtgctattgaattcagtttgctagtattttattgaggattttggcatttattttcatcagagatgttggaaagtaattttttcttataatctccttgtctggctcctctattaggtaatgctgggcttctgaaatgagtttggaagtatttccttttcttcaatttttggtagagtttgaaaattgctataaattcttttttttaagtttggtagaattcaccagtaaagccatctgtctatgggcttttctttgctgggagatttttcattacagattcaatttccttgtttttcattgatccattcatattttctattactttataattcagtctcaatatgttctattgtttctctaatcactatttcatttatttctgctctgatctttgttatttcctttcttctgcttacttatgttgggcttagtttgttctttttctagtcccttgagataaagttaagttgtttatttgagatcttcactccttcttaatgttaagtaagtatttatcgataaaaatttccctcttaaactgcttttgctgcatcccataaattttggtatatttcatttccattttgtttatctcaattttttaaaaaaatttcttctttaacccattggttgtcactatgatctgaatatttgcatcccccttgaaaccctaaccaataccaatatggtattgggcggcgggtgggaggcctttggaatgcagagccctcatgattaggattagtgcccttataaaagagacgtcaccaagctagctagccccttcctccatgtgaagttacagtgaaaaaacattagtctatggagaaagcaggccctcaccagacattgaaactttcattgccttgatcttggacttaacctccagaactgtgagaaatatgtttattgttgataagctacctagtttatgctactttactagaaatgcctgagcaacctaagacagttgttcagaagtggtgttcaatttccacatatttgttaatttttccagtattcctcttgttgttaatttctagttttataccactgtagtcagaagagatacttaatatgatttcaatattcttaacatttttcaagacttgttttgtgacctaacatatgatctatcctagagaatattccatgtgtgcttaacaagaatgtgtatttggttgctgttggatacagtgtcctgtatatgtctgttaggtttatttggtctaaggttcagtttaagtccaatgttccttatttattttatatctggatgatctgtctgtttttttaaaatggggtattgaagttccccttctattattgtattgctgtctatttctcccttcagatctgttaatatttgctttatatatttaggtgttccaatgcttaaggcatatatattgtcatattctcttgataaattgatccctttatcattatataatgaccttatttgtctcttgtgacagttttttacttaaagtctatatttttctgatttacctatagccactcctgctttcttttggttaccatttgcctagaatatattttttcatcccttcactttccgtgtgtctcttgtaggcagcatataattaaatctttttttttttttgagacagagtctcagtctgttgccaaggttggagtgcagtggcatgatcttggctcactgcaacctctgccaaccaggttcaagcgattctcctgcctcagcctcccgagtagctgggattacaggtgcctgtaccacagcacctggctaatttttgtagttttagtagcgatggggtttcaccatcttggccaggctggtcttgaactcctgacctcgtgatccaccttcctcggcctcccaaagtgcagggattacaggcatgagccacggtgcctggcaaaattaaatcttttttaaaaaaatccagtcagccactgtatgtcttttgattggagaaattaacccacttacatttacagcaattattgataggtaattacttcctattcccattttgttaattgttttctaactattctgtaattttgtttctttcttcctctcttgacatcttcttttgtgatttgatggtttctataatggcatgctttgatttctttctttttatcttctatgtatctactaaggctttgctttgtggttaccatggggcttacatgaaacatcttataattagataaatctattttaagctgataacaacttaactttgatcacatacaaaaactctacacttttacttctctcctcacattttatgcttttgatgtcacaatttacttatttttatattgtgagtccattaacaaatcattgtagctatagttatttttcatacttttgatttatacaccaccattacagtatacaagtattctgaatttgagtacagatagtccctgacttacaataattcaactaatgatgcttcaactttacagtggtccaaaagcaatacacacttagaaagaaaaataaaacaaaacaaaaaatttcagtatagtattcaagcaattacatgagatattcaacactactataaaataggctttgtgttagattattttgcccaactttaggctaacataagtattctagatatgtttaagctataacattcagtgagttgagtgtattaaatgcattttcaacttataatgttttcaacttttgatggttttatcaggacataaccccatcataagtcaaggagcatttatatatacttacctttaccattaagttttatacttttatacgtttcatgttacaaatgagtgtcctttcatttcagcttgaagaatttcttcagttgttttttttttttttttttagacagagtctcgctctgtcaccaggctggagtgcagtggcatgatctcggctcactgcagcctccacctcccaggttcaagtgatttctcctgcctcagcctcccacgtagctgagactacaggtgtgtgccaccacgcctggctaatttttgtatttttaggagagatggggtttcactatgttggccaggatggtcttgatctcctgatctcgtgatccacccacctcggcttcccaaagtgctgggattataggtgtgagccaccgcacctggccttcttcagtatttcttataaggcaggtctagcagtgatgaactcctccagtttttgtgtgtctgggaaagtttttatctctccctcatttctgaaggatagcttttccaggtaaattgtccttagttggtaggttttttttcttttagcacattgaatacaatatatttgactatatcctactctctcctggtctgcaaagtttttgctgagaaatctgctgataaccttatgggggttcccttgtatgtgacccatctattttctcttgactctttcaaaattctctttgtctttgatttttgacaatttgactacagtgttccccactgaagtcttctttagattgaatctgtttggggacctttgatcaccatgtatgtggctgtccatatctctcccactatttgaaaagttttagccattatttctttaaataagcttttgcccctttctctctctcttttccttgtaagatttccatagtgtggaaattttatttctcttggtgatgtctcattaattctgtaagttttcttcattccttttcattcttttttctcctctgactggataatttcaaatgacctgccttcaaattcacatattctttcttctgcttgatcaagcctgctgttgaagctctctattgcatttttgcattccattcattgttttcttcagccccataatttctgtttggtacttttgtgatttctttctctttgttgaatttgttcggttcatgtattattcttctgatttcattgagttgtctatctgtattctcttataggtaggtgagctttcttaagacaattattttgaattatttgtcaggcactttttatagatcttcatttctttggggtcagttactggaaaattactgtgttcctttggtggtgttatatttccctggttgtttgtttgtttgttttttatgttcctttaagtcttgcattgatgtctttccgcttgaagaagcagtcacccctctgacttgctttgggagacaaatgccttcaccagtaaacctgattagaaattccaagccctctcagacatttttaatgaaagcatccattccacccttcttgtttcctcttaggttggatggaattcttaagattgtatgccttctttcaattttaaagccatgctgggtgttgagaacctccctcatttcccatatgacagtgttttgaaatgcttaaatttgtgtgccttctcccaatttcccagagtcaagctggctgactatacatgcttgttagccaactgcaaaggctaacactcactttccaggggtacacacagggagccagccatgggtggagagataggtgaggtgtttggagcattgaggtgtccatgggtcaactggaggatctgcaggtgaggcatcccaaacagcttgtgggcaggcttcctgatggattctgcaaagcagttagtaggattgtggccctttgttgagtcccatgtcctagttactgtgagtctccacctctttttcctactcccagcttctcccagctactcaccatacttatgtcctcagtattctagacaagtatgacaggcaagaaaaagatgagcctcttggacagcattccacgcagctgtggaacctgggcactcactcattgctctcattttttcctgtgggaggaattgcaggtgagggaatctcttctgtcattgagctgtgaccccatggtggagggaagatgctggtaaagtaaagatgttcttaccctcttgaatgcatctgttctcagattttatgattcaactgtgtgctggaacttctcccactggactctcagattcccacagaggtactcttatctttgggtgactgtcaaaatcagtgccctatagataaatgatgatagaaaattcctattccaccatcttgctgacatcattgtcttccatttgttttctgttctgaagtttcctatgctctctagggctgcttctcaaggccacctgcccacatcattggtgccttctctcaactgcccatggtttctgcaagattgcccatgaaactgtgttgtagtccagctcttatgctctcagaacaagaaacctagaataataaaaataccagatttaagcccagaatccacttcagcagcactcagatcttccaaatgaagaaagctaattatctgcacccactcttccttaaaacagcaacattcaaaaagaagtgagcagctcctctccaaagatgtgtaagcagaggcacaggaactatctgttctcagccaaagatattctagccttgtgctactaccaatgtggtccatggaccagctgcataagcatcacctgggatgcatcagaaatgcagaatcttgttagaaatgctccctccactccagatctactgaattagagtctgcactttatcaagatccccagatgatgcatgtacatattaagggttgagaagtgttagttcccagccacagcagcacattagaataaccttggcaactttagtttttaaacgtcaacacccaggccccatccacaaccaagtaaatcagactctctgtgagtggggcccagacatctgaattttaaatgttcccaatgggattctaatgtggcctgagtgagaacttcccatgaagattccttcacttcatacccagctagacttgagaaattttccttctcttctttgttgctttttcataggtaatatgtgcacataacttttttaaagtcaaagaatataggccgggcatggtggctcatgcctgcaatcccagcactttgggaggccgagtcgcgcaaatcacttgaggtcaagagtttgagactagcctagccaaaatggtgaaaccccgtgtctactgaaaataaaataaaataaaataaattagccaggtatggtggtgcacgcctatagtaccagctacttggaaggctgaaatgggaggatcacttgaacccgggaggcagaggttgcagtgagccaagatctcaccactgcactccagcctgggtgacagagaagactctgtctcaaaataaataaacaaataaataagtaaataaataaaagtcaatataaactagtgtacagtgaaaagaaagtctctctccatctctaaattttagtgccccaatttcctctccaaaatcaaccactgttaccagtttttgtgtctgtgtgtgtgtgtgcccttccagagcttttctgctttgcttttttcttttctttttttttttttttttttttttgagacagagccttgctctgttgcccaggctggagtgcagtggcgttatctcagctcactgcaacctccacctcccaggttcaagctattcttctgcctcagcctcctgagtagctaggactacaggcaagtgccaccatgctcagctaatttatatatatatatatatatatatatatatatatatatatatatatatatataatttttttttgtatttttagtagagacggggtttcaccatattgcccaggctggtctcaaactcctgaccttgtgatcctcccacctctgtctcccaaagtgctgggattacaggcgtgagcccccgcgcctggccctcccagagcttttctatgaatgatcaaacacaatcaagtacagacacccttcttctttatatatagtagtattatactatatatgctgttctgtatcttgctattttcactcaacactctatcttagacattgtcccacagcagtaattgtgtctcaattctttttgacagatacatactattctattgtatcaatgtagcatcatttattaatcaatctccaattaatgtacattcaggatatttccaattttttcttactacaaataatctgcaatgaataatacataaaacagtacacacttaagtcactctttccctcttttcctactttttttcaaagcactcgtcaacaccacctcagggtagccacatcatttatcatacagactggaacacttcttttttttttttttttgagatggagtcttgctctgtctcccaggctggagtgcagtggcatgacctcggctcaccacatcctccacctcccagattcaagcaattctcctgcctcagcttccctacacctgtagctgggactacaggtgtccacgaccatgcccagctaatttttgtatttttagtagagacagggtttaactatgttagccaggctggtcttgaactcctgacctcaagtgatctgaccacctcaacctccccgagtgctgagattacaggcgtgagccaccgtgcctggcccagactggaacacttctgagagcagaaaggggcactaacagttctactagaacatacctatgactatgccaggcaactgggatacatgggcatcctatatgatttattatgcattccctatttatttctttattgtctgcttctcccactcgaatgtaagctcctggagggtaaaaactagtctgtcttcctcataactgtttctctagagccctgaacagtgcctggaatgcagtggtacctcattaaatgtttgatgaatgactaaacgaattaaaattaaatatctctgaatagcatcattagcacatgtgtaagaatatcattaagataaattcctaaaagttgaatgattgcatcaaaaggtatgtgcttttttttttttttttttttgagatgagatctcactatgttgccttggctggattggctctgaactcctgggcttaagctatccttctgcttcagtctcccaagtagctggtagtatatgcatcttatattttagtaaatatgactgtattgtactccatggagtatgtactaattagcactcccaccaacaatgagagtgggacatctccctccctcaatctgcatggcctgcgtgtgtgcatgtgtgtgcaaatgtgcatgtgtgtgcaaatgttcacgtgctcacacatccatactcagtgtgctccacacacaggcacacagagacctgctaccacagtgctgccaggacaagcactgaaacttctgactccccagggacacagattctggtgctgggagaggagaaggaggcccctcacactctcgatcaagggtgtttgttcatcctctcttctctccccgccaccgtacacttcccagacaggatcaacatttgcaaattaccttccaggactctgactatgagacacagcatggcagcacctagttcaggcctagctcaataaatgtttaattaattaatcaatcaagccaaatcaaagattaggttgattatccagatatctttatctatgtggaagtaggcaactggttaattgctttttctcttttgtaaaattttgtactgaaatgataataatatatttgagaattgcacagatatgacctcaaaggtcaaaagcctggtaagtatgaaatattcccagggtgtccccaggggcagactgctgcgaaagcaattatcattatcctaggagtcaatgccttggtgttgccatgatgctgaggtagaaaattctctggcttatgatggaataactaaaatccacaaatatggtctgttacaggaaggggttccgatccagacctcaagagagtgttcttggatctcgtacaagaaaaaattcagggagagtccacggtgcaaagcaagtttatttaaaaagtacaggaataaaagaatggctactccatagacagaacagccccaagcactgctggttgcccatttttatggttatttctcgatgatatgctaaacaagggtggattattcatgccctcccctttttagaccatagagggtaacttcctgacgttgccatggcatttgtaaactgtcatggcgctggtgggagagtagtggtgaggatgatcagaggtcactctcatagccatcttggttttggtgggttttagccagcttcttgactgcagcctgttttgtcagcaaggcctttatgatctgtatcttgtgctgacctcctgtcttatcttgtgacttagaatgccttaaccatctgggaatacagcccagtaggtttcagcctcattttacccagcccctactcaagatggggttgctgtggttcatacgcctctgacgattttccccactgtggctgtccatacatatgctgatcatgaggacaaaggaatgggttattgcataagattcttaaccgtgcctctccctgtgggattccagcagaatctgggcatgccacagctctgtgagaaaatattaggttgaggccgggtgcagtggctcctgtaatcccagcactttgggaggcagaggcaggtggataatttgaggccaggagttcaagaccagcctggccaacatggcgaaaccccatctctactaaaaatacaaaaattagccaggcgtggtggcacgcatctgtagtcccagctactcaggaggctgaggcaggagaatcgcttgaacccgggaggcggaggttgcagtgaactaaaatcgcaccactgcactgcagtctgagcaatgaagtaagactccatctcataaaaagaaaagaaaaagaaaaaaaagaaaatattatgttgggtaaagtgtaggaaagtgaaaatctggtcatcaaacaactgcaatgaggagagatgcagtgtggttactgtgcttcatagatttcccacggagagtggtgatttctacgaaaccccatccaagagccctgtgggcatcccatgttcgtatccctaagttcctcatgtcgtcacttaagagccataaattatctgccttactttcatttacagatcagaaggtgctaagatttttgtgccattgcattttgctgcaggaactagactagggctttttggatattaatctggttaaaattgtgctcttggcggatttgggatggaataaaataacagcatcccgagggccttctctgcaaaatccacaaccaggcgcccagggcggatacatccagaacctgccactcccctgtcgccggcagcagctcagtctaaactggcccgggacctccggaaggtgcagtctgcagagcgggaagccctagcaggttcaatacaactagaaattttggggtaacttccagaagctggaaaaaataattcacaagttccccttactttctaaagatttgcctttgatttttaaaacgctcttttgggtcgagttggatcactcactcacacattcgtctgggaggcagtgatctggcagcagcccatgcctcagaggctgccaggaggactccagcggctcatcgaggcctccgattccttgcagtctgagccggagcgcagagatgcgtgatcccgaccataagcgctgccttcacaggctgtcggggagtgtgaaccggggacagcagagctggctggcagccccgcagtagccacttcctcctccacccgcacgatgcaaacactcagaaagatcaatagctgttgcttcagaatttccctctgctcaacgttgtcaacacatgttcagccacactcagtgtgtgtataagtccacaaatacccgagccaacaaacacattgatcacacgtcgatcttcacggtcgactcaacacctttcaatggtgcaacacatcccagcggagggcaaacttgggcccagctaaggatggatgcccgcaggctcccaaggggtccaagtctaatcaagattcactaaggctttggggatgctaatctggggacattgcaaccatgcagggacatttgtgccatcttcaggcccggatcgcttatgagggaacatgcctccagggtctggataacagatcacatatcagaaagcacagaagtaggccaggcacagtggctcacacctgtaatcctagcaatttgggaggccaaggcgagtggaccacttgaggccaggagttcaagaccagcctgggcagcatggtgaaaccccatctctactaaaaatacaaaaattagccaggcatggtggcacatgcctgtaatcccagctacccgggaggctgaggcaagagaatcacttgaacccaggaggctgaggcaagagaatcacttgaacccgggaggtagaggttgcagtgagccgagatcacgccactgcactccagccttggcaacagagcgagatctgtctcaaaaaaaaaaagaaaagaaaagaaaagaaaagcacggaaatagtgtccagagaggcagcacctggaggcatgggctctagaacaggcatatgccttctggagaactcatgtttttagccatgacgcgtcttccatcaagtgccacaggacgacctcttaacaggtggcagctccagaacaactcggttccaaattacctgtgtctgtctgtgttaaaaagaagaggcagcactgtctttcctggggactctaaccaacagcctcatgagcactatggaaggaacccaactttggcaatacataggcttggggtccagctctggctgtgccgtaaatagctgggtagccttgaccaggtttcagaaccccttggagctttgatttcttaatctctaaaatggggatgatagcattcactccctctagtttgttgtgggaattaaagaagacgcgtataaaacgtttaggactcaacaggagggcggcacgtagaggggcaggaagaggccaacagtcaacccactgtgcagggaaactcggccttcctgtggtctttcctcctgcagggcaaccttccccaggaccctctggaaagcagaggtcagaccaatgtgcttctgtaaagtatcatagccttgagattgaccttgaacgtaagagtgcatcatggacatgcagtgagattggggataaggtagtgcatgggcagcatgcagaggaggcttgggttgggaggaataagaagaaaaccttgtgctaagtgcacccatcccacacacgcagctcatagacaggaactgatgggtgacctcctggaggatgctatcgtggtgcctacgaatctcactggagtgtcctcagcagacactcccacccctgatcttcacgcccacattatggaccttccacaacagaccccacatgcacaacaaggcacgaggagggtgaggactggccctgtgcaggttgccagccagctccccttatccctgcagtatcttcctttttttttaatttttatttttttgagacagagtcttgctctgtcatccaggctggagtgcagtggtgcaatctcggctcactgcaacctccaccttctgggttcaagcgattctcctgcctcagcctcccaagtagctaagataacagatgtgcagcaccacacctgactaatttttgtatttttagtagtgatggggtttcaccatgttggccaagctggtctcgaactcctgacctcaagtgatccgcccgcctcggcctcccaaagtgctgggattacaagtatcttctgagactgctgtaaaaccagtggggactcctggacacctcgtatggccccagggaggagctccagccctgcacggggatgaactgagtggactttggcacacgtaggtggggtacacacaccccatcacacaggcagttgagaacatcgcctatcatcgctgttcaggtccaggaggtcggacttggacacacgatggggaagctgccaggcaagttcccagggcagaaaagcagacattgaaagacgcttctgagaaaccaatttgggaatctgtgtgatatgatatagatgagacaaaagggagaaatgtcattttgcacttcttcctggagaaaaactaaacgtatttagaggaaagactttgataagctgcctatggtttggggatgacactgcagaagcctgttgaagtaataaagatggcattttgaaaataataataaaaactggccaggctcagtggctcaggcatgtgatcccagcactttgcggggggtggatcacctgaggtcaggagttcgaggacagcctggccaacatgatgaaaccctgtctctactaaaaatacaaaaattagcagagcgtggtggcatgtgcctgtaatcccagctactcaggaggctgaggcacgagaatcgcttgaacccaggaggtggaggttgcagtgagccgagatcgcaccactgcattccagcctgggtgacagcgtgagattctgtctcaaaaaatatatatataaataaataaatgataaaaataaggatggcaatcaatctgcctcctaaagagaatcctgttatctggggcgggtagggggaggggcaggcagtgctttgttttattgggtttaggattgtgagtttgaggataagacggagggaagagcttaacagttggacatagagagtagaaaggctttgcaccctggcacgatgaagagccaggtgattggacactgtctaaaggacagttgggaatgaccaagagtggccattggtagccaggaattttcactgaggatgttacaaagtctttgagtcgtgaccctaaaaacaaaactttttccctactcacaacatttctggcacaaaatgtgtgcattttccacatcaagtcattttccagttctctgaagacaccaactgggtacccagtgattcatttcaattctgaccttagctacctggagatgatatcagacctcatacgactgcctcccacgtcacacaccaattgcaagtagggggtcttcaggttgcccacacttctttctgtctgacttggctacaaatcaggggttcccatagccccctcttcgataattcaataatttgctaccataataataataattagaaaataaaggttcaataatttgctgtaacagctcacagaactcagggaaacgctttacttactgttaccagttaactataaagcatataaataaagagtcagatgactaagtatgtagggagaggtctggaaggggcaggaagtccgtaggagcttctgtccccatggagctagctggggtatgccaccctcccggcacatggatgtgttcatcaacccagaggcttgtcagctcccattgttcaagtttttagagcttaacctccagtctgcttcccagaggtcaatgtgtgggaatgaaagttccagtcctcaaattacttggtctttctggtgaccagaaaagctgatctttctggcaacccaagctaaggctgtctagggatcccagactaagctacatcattagcataaattcatgggaccaaagaggctgattatgattaacaaaagactctcctatcactcaggaaattccaagagttttaagatctctgtgccaagaactgggaacaaagaccaactatatttcttatactatcgccttctctgccgaccagggatcattcatgcttttgtgggtaaggacttttggagcgtgtgggaacaatgtctaggttgatgtgtgagcaaaacacacacaacatgcctagacacaggagccaggggatgagggcagagctgctatctatgctgtagcaggagccagaggcttggatacagacccagctctgcagctcatgattttcataagcagccgaaatcagaccactgcactccagcccgggcaacagagtgagactctgtctcaagtaaataaataaataataaaaatgaagatggccttcaatcttcaatcaaaaaatcatctgccttctaaggagaatcctgttaactggggcggaatgggtgctttgtttcattgggtttgggattgtgagttagaggataggactgcaggaagagctgaacagttgggcaaagagaggagaaaggttttgcaccctggcacaatgaagaggcaggtgattgggcactgtctagaggacagttgggaatgaccaagaggctctggaaaagccccttcccctctctgggttttatttatttactcaaccctaaaatgggctcatgcgtttccaaccatcacattctaggattctgacttaagttcagcactctccacaatgcaaagtggggtgatagcatttattaacagagcatttgtgcattgatatggaatgtacttgctgcatccccacataatgaattttctcacaaattatatatgctaagaactgctcagattaaactgtaagatcacatcagatgcactattgattttcgttattttagttttctccatccctgagttttctgcaatttatccgccaatttcagcagaacaatctctgcctcctctttctagtaatcagttcataaaacttcagaacttgggagtttgaggaactaggctagtttggatacaatacctgtccttctacagggatgatgactgtggacctcctggagtcagtagggattcctctggctagagcagtagatgtctttcaatggcaacgtgaatcaacagccatgcctgtatacacactcttcttatgaaataaggaaggctggacactgtggctcatacccatagtgccagcactttgggaggccgaggagggaggatggcttgagcccagaagtctgagaccagcccaggcgacatggtgaaaccccacctctacaaaaaaatacaaaaattcaccgggcatggtggcatgaacctgtagtcccagctacctgggaggctgaggtgggaggatcgcttcagcctgagaggttgaggctgcagtgagccaagatcacgccattgtactccagcctggtcaacagagcaagaccatgactcaaaaaatagtaataaaataaaagaaagaaagcaacttctgttatgaaaaaatatcctgctaatgcacaaatgctttatccctctattattatagctgcccactggggaacactagcagcgcttctccatggacgctctctggggtgcccagtttcccatccattttgcccttttgaccctgtttccttgcaatgactaggccgtacagtttctaggcagccccagttccctcaaaagggcaagcaaggtaattttccagcaaaggaggcccctcctgactttgcaagggccatgtagggagctgagatcctcgggtgtccttttcagaatctctcctctgattcattgtcatcccagaacagattagctctgcaaacaaacaccaaattattaaaattggacactgctctgcctctgacatgggaaacggttacagatagctttgtatagaatgacttctatgacagagcaacaagatgtacaactccaaggctattaaaaacaaagcaagatgaaaagcaaaaccagaagggctgctcacccaaaaactttcacgggaacagcaaagaagtcaagggattattcatgagaaaaagaccacaaatagagaaacactcaatggcttaaagtgtgagccttggagacttgcaatgagctcattcatcactcacttacttttgtacaaagggccgagcgctgtcctaagtgctggatcccccacaactgagaacaaccaacaagatcctaactcctctgacatttaaatacctgtagggggccaggcgccatggctcacgcctataaacccagcactttcttgagtccaggagtttaagagcagcctgggcaatatggagaaaccctgtatctaccaaaagtacaaaaaaaaaattgccagatgtaatagcatccacctgtagtcccagctactcgggaggctggggtgagaggatcacttgagcctgggaggtagaggttgttgtgaaacaagatcaagccactgcactccagcctgagtgacaaagtgagaccctgtctcaaaaaaaaaaaatcagtaagaggagaccaacaattaagttgtaaacatatcataaacaagatgacttcaggttggacatggtggtcacacctgtaatcccaacactttgggaggccaaggcaggaggatcacttgagaccagtagttcgagaccagcctgggcaacatagtaagaccctgtctctacaaaaaataatttttaaaaattagtttttaaaaaagataacttcagaaagttgtaaattctattaagagaacacaacagaatagagtgattgagagatattggcagggtcacagacgccactcctataccctgggtgtttaggaaaagcctctcaggatgtgacattcaagtggggtgcagagaagcaaaaaaactcaggctaactcctggaggattttggcttgagcaactccagtgaaaatgaattatcagtgtgtcaggatgaatgataaaccctttccattattcttgggagggacacaaagtattctttttgttttgtcgggagtttaggagccaactcgttagaaatgtaagcggtggcaacattccactctgcaacctgagaaatacttgagctcttctttgcatatgatgatttttaacctatttcttcagaaaaacaaactccaagcagaggttcgaaacaaatgctggcataagtgtcaacatccactttgtgaaggctcaaaggcaggccctttctctgccagaaatgtgtttctcatctgcaaagggcaggagaggccttaacccaactgtctggttgatgatccagacttcaaacttaacccagtgggtcttggagccaacttaatagagaatggagtgtctttgttgaaaactctagtgtgttttgtggaggggagtgtgcaaaagccagctgaatgtgcaagggagggatgagattatagaagaggcaaaatatcaaggaagagaaactgcaaacagattcgtgagactcgattggctgcgtagcagcaagtatcatttctgtgattcctgtaaaggaatcacacgacgacttccaagtgcatctgcttgctgtgtggatggcctctaatgagacacagtttctagccaattgggtttcacaccgctcagtgccagcttggcgatttgttttgcattaaacactgcagcctgttaacctggtgagtaactgttctggatgggcagccagaatccctcactgaactgcccttttttcttaaaagaaaaagaaaatgatgatggtgggggtggtgatgatgatgatgaaaatgcgatcaatcaggttaccatcttaaaacttgaattcattgagttaaaatgacccagataatgggccttttaaaaatattttcggccgggcgcggtggctcacgcctgtaatcccagcactttgggaggccaaggcgggcggatcacgaggtcaggagatcgagaccatcctggctaacacggtgaaaccccgtctctactaaaaatacaaaaaaattagccgggcgaggtggcgggcgcctgtagtcccagctactcgggaggctgaggcaggagaatggcgtgaaccccagggggcggaggctgcagtgagccgagattgcgccactgcactccagcgtgggcgacagcgagactccatctcaaaaaaaaaaaaaaaaaaaaaaaaaaaaaaaaaaaaaaaatattttctgggccaggcacggtggctcatgcctgtaatcccagcactttgggaggccgaggcaggtggatcacttgaggtcaggagtttgagaccagcctggccaacatggtgaaaccctgtctctactaaaaatacaaaaaattagacgggtatggtggcaggtgtctgtagtgtcagctactcgggaggtggaggcaggagaattgcttgaactcgagaggtagaagctacagtgagccgaaattgtgccactgcattccagcctgggcaacagagcaaggatccatctcaaaaaaaaaattctggaacattccagggtagtgctcaatcctcaatccatttttcagcctttctgtgccctctgctcttgctgggagaactaggcctctccgtttctttcatttcagtctcaagataatttagagttctggagtgcgcaacacacttgggaattcgacctggaggtgactgagctggggcctgggggcagtggaggggagcagtataggaacaaagacatcagacttcataaatctcaactgtaaatgtaaaagtcctcctgtgtctgacaccaccagaattgtaggatttttcttctttaggtgacaaaaatgaacggtccccagcagaagcagtctgtccatggtctctttctcattggtccaaataaacttaaaaccttgtgctaggccaagagtctggatcccaaagcacactcaccaaggctccatttgagccccccatttaccctgaaaatactgtggtcaccctccccgcattcctcctacctctttccacagcagaagggagggggtgtgtcagctgtgataccatcagccaccaatgtgtgtcaccgctccttccacaatgggacgcttgctgggaaaaacagctcattctcaagcctccttccctcgaggtcagggcagggcaatggtggggatcagtctctgcagaagaagaatcttgattttctggatttcagctgcaacttctgcttcaacaagaactatgtagagcccatcagaactattaggctgctgaaatgagttgatgaaagctatgccccatccacatgtgaaacttacagggtgataataaaaggtttccgtggcaatgacaacaaatgttttgtttctttgtttgttgcttgtttttctaggcacttccaccaggggatgcaatgaatgtttttgacctacaatgaaaaaaaaaagtcttcttagcttgcagaagtcaggaaagattgtgtgcacatgcatatgtgtttgtaggtgtttgcatagtgtacattaagtgtgaggtgtgtgtgtgtgtgtcactttcaaagtaccagaagccaaatcatctgttgattttctgacaaggtacatggtccttttcaactaccaaaaatagaaagatgaccataagcagatgaatattgtcagaaagcacacaccagacagccctgagcatttgattcagctgacattggcaactgttcacagtgagtttctgctcccatcgtggtcaagacaatcctccaagcactgtggcccctaaggccaagcccagaagttgcagggctcattggtttgacaccaatatgtgctgattaagaagctgcaccctggagaaccacaaattgttttaagcattttgtgatctaacatcttttttttttgagacagggtctcactctgtcgcccaggctggagtgcagtgctgtgatcatgactcactgcagcctcgattcccctgggttcaagcattccctcctacctcatcctcccaagtagctgggaatacaggcatgcaccgccatgcccagttatgtttttggtttggggtggctttttggtttttcattttgtttttgtggagacagggtcttgctatgttgcccaggctggtcttaaacttctgggctgaagcaatcctccagctttggcctctcaaagtgcagggattacaggcatcagccaccacacctcgcctgtgatctaacatcttaagatttcaagcaaatatgattactttccaaaagagaatacttccccagtgcttctctcaaagaacccagggttagcaagccatttgagacttgtttggtgaagtgtttgtgagatgattccataacatataaaagaaacttaatcaaggcaatatgaggctttgtgaaaattaacagacaaataacgggggctctagagttcaatgcagaggactgggctgtggccagactcccaattgcaagagggtgacacacatcagtacacaaagaagcaaccagcaggcaggtcacgtctgaaatacataaacccatgctgtccgtaatgcaattcaaagaacttgtcgtgctagaccattttacataaatattttccaacatattcaatcagccccctcaaattgacactgtcaccaacatcaaatcaatacttcttgggagggaggaataagtatcttatctaataatcaacttatttgagatctgcaatgctggctgctattaccgaaagacatttctcaattatttacatttaactatacattactttgatttttgtctcagctgcattcagataaaatgtgagcttctaatttaatttttgtctggatttcctgtgacatatctatttatgccaatttcccaggaggaaatggacatcagtaataaagatagttatagaaaacacttacaaagcacttttagcatgccagactctggtctcaagccaccatcaggattgtccacttcaatcttcaggcaagtctatgaggaggccacagattgatatccccattttatggatgatgaactggagctgagattaagtgtcttatccctgagatttgaccccggcagtctgactctagagccctgctactggcaggacatggtgattcccacttgaaatctccgcactttgggaggccaaggcaggaggatcacttgagcccaggagttcaagaccagcctaggcagcaatgcacgaccctgtctctacaaaaaattaaaaagttatctgggcatggtggtgcgtgcctgtagtcccagctacttgaggggccaaggatggaggataacttgagcctgggagttaaagactgcagtaagtttttatttatttatttatttatttatttatttttacttatttatttattttgagacagagtctcactctgctgcccaggctggagtgcagtggcacgatctcagctcactgcaacctctgcttcccagattcaagtgatcctcatgcctcagcctcccaagtagctgggattacaggcgtgcaccaccatgcctggctaatttttgtatttttagtagagatggagattcaccatgttggccaggctggtcttgaactcctggtctcaagttatccacccaccttggcctcccaaagtgttgggattacaggcatgagttaccacacccagccctgcagtgagctttgatcataccagtgggcaacagagtgagaccctgtcactaaaataaataaaataaaataaaaatagatccctgcttctaaccactgcacagtcccacttcacagtagcatgagtaattccaagcagagatttccataccattttctgctctgagtcagcagataataagagggtcatgatgttaacaccagaatggacctaagtgatgaccccatccctgaagaaggtcaaagccacttccgtctgctgttctgctctgccgtttgatttccttctaagatgtttgcccttctctaggagttttgtacaagacttgcagcctctgtctattgcattctttagacaaacggtgttttctgagttggactagaagctaaagaaaggaacatgtggatgcagtgtggcacacggatgaagcctgcctgcatcaaaaccccagctcatcctctattaacgatgccttccagtggaaggataaagtcaccgtacctcagcgtcttcatctgtataatggggatgatcataattcctctgcaatgtggggttaggaagaggaggacaagaaaccacacatgttggccaggcactgtggctcatgccagtaatcccagcactttggaaggctgaggcaggctgaggtcaggaattcgaaaccagcatggccaacatggcaaaacactgtctccattaaaaatacaaaaaaaattagctgggcgtggtggtgcacatctgtagtcccagctacttgggaggctgaggcaggggaatcacttgaacccgggaggcggaggttgcagtgagccaagaccatgccactgtactccagcctgggcaacagaatgagactctgtctgaaaagaaaagaaaaggaaagaaaagaaaagaaaagaaaagaaaagaaaccacaccacacatgtaaagagctcaccatgctcctggcacagagtaactgcttagttcttggttatgggtcacagtcaccccggagactctccctgcaccacaccctgcacagcacctgctctgggactttgttatacactctctttctctgctgttctgtgactcactcactggcctgggttgtgcctcattcatctcaggagccccagccccaacacagttcccagcccgtagctggcactcgtgaatgtctgctgattgagtgagtgactgcatatatgcactcgctgcaaccccagctcactgcgcagacgaggcggcaagttcagagggaccaagcctctaactggggccatggaactggatggtggcacagttaaagggcgactgaagctgcttgacttccagtccaatgtctgcacaccacagcaccttaacttcttgctcagtcacccaggctggagtgcagtggcacgatcctagctcactgcagcctcaacctcctgggctcaagtgatcctctcacctcagcctcccaagtagctgggaccacaggcaggctaattttattttttttatagagatagggtcaccttatgttgcccaggctggtctcacactcctgggctcaaagagatcatcccacctcggcctctcaaagcgctgggtttataggcacgagccactgctcctggcctgcaattttctttaaaatgtttttttgttttgttttgtgttttgttttgttttgttttgttttttcttgagacagagtctcgctctgtcacccaggatggagtgcagtggcgtgatctcagctcactgcagcctctgcctcctgggttcaagtgattctcctgcctcagcctccccagtagctgggattacatgtgcccgccaccatgcctggctaatttttgtatttttagcagagacggggttttgccatgttggccaggttgatttcgaactcctgacctcaggtgatccacctgcctcagcccccccaaagcactgggattacaggcgtgagccaccacacccagcctaaaatgattttatcacagactaagatcaaacggataaccagagcatcattaatatcaaactagggatacgttcacaatctatttttcctactttccataatttacatgtcagcaatccatcacaaaatgaaaaaaaagttacaaaaatacggacctaaacatttttagtgtcttgcattttaactaattacacagtaatactatgataatctaattgcaattgacaagataaaaatgcacagtaatcatgtattgcacctgatataggcaatattacatgacctaatatcctgccttttacgtgcctatttcattccttggaagctccctggtaataaatatgctattaagcagggcttttttaatttgcatgtttcccttatagtgattcatcaataaatttttctgatttccttcataaataagtttcattattcctcattatttaaaaaaacaaccactttctcctgtcctgaaaggatgtcatatattagatgaccttcctatataaaatcacaaatgagagaagaccagacaacctgcaagaaaataagtaatcagacaatcgggcattaaatacagctgggcagacagtaggcattatggtatagtctgcaaaaaaggccagaggcagtggctcacacctgtaatcccagcactctaggaggctggggtgggtggatcacttgaggtcaggagctcaagaccaacctccccaacatggtgaaaccctgtctctactaaaaatataaaaattagccgggcatggtggcgggcgcctgtagtcccagctacttggaaggctgaggcacgagaatcgtttgagctggagaggtggaggttgcagtgagtgaagatcacacctctgcactccaacctgggcaatagagtgagacaccatcttaaaaaaaaaaaagagtctgcaaaaaaaaaattttacaaagcaaaaatcaaaagagaatttagttttactacagcatgagttaagtctcagcttttgcacaatttatccatgatttcttcattttgttgttttaagcatgcttttaagacatactggataactagtaaaaattgtatacaatttcaaatgacatttcagataagttttattgacttaatgctctgataataaaattataacaatcagtattattctgatttattgcaatttttactttcattttgtaatggacttggtgcattccagcattgaatgtaatgttgctgccatctcaaggtcactcactgaaaatgaggtggctcactccagtttagtgcactaaagcacatcagtaaccgagggctttatggatgaaaataccactttgtggtcacgtcgcagtaaatctaaacttttatttgcaatgaaacaatgggttttatacacaattttaaatgaaaacatactccagtcatgctactatggcaatgtgagtaccggatctgtgagagaaaaggcttttatatcgcagtccaggggaagaaatgtcagtgcatgaaattgaagaaccatctgtgccactggcatattgacacagcgtcatccagatacagtggtttctttagaaagagacatcgtccttgagtttatttttcgttcgtaaagcacgcttggctattttccctccctcttcaatctttcccagttggtgacctccaccaccctgacactcttccgtctggatttatcaaaactacccttaacatgaataaacagttcacggaaaaggaaatgccaatgagccgattcaaggagatacatgttttgcctaacagattgtcaaagatcaactttcgatcacactggtttggcaaggtagtgctgtaaattaaaaaagaggaatatgtggtgatagtttccaaattttaaaatgcatataccttctgaccagcaatctcatctctaaaaatgtatctgtcagatctatacatacgtgtgcacacagagatgtatgtacaaggaaatttatcacagcaaaagactggaaacaaactaaatgtccatcaacagaagagatgtaaattatggtcaatccataaaacggaacactgtacagcctttgaaatcaacaaggcagctctgtatgtaccgatatggcacaatttctgagatcatacagttaagtaaaaaaaaaaaaaaaaaaaagcaactgcaaaacattgtgtatagtgtgcttagggtgtacgtatttgcatagaatctctgtggaaaacacaatcagccactaacaatggttcttttgtaggaagaactaggggactggtaacagggtgggagagacttacaattcattataaactcattttgttttgaattgtataccgtatataagtattaactacttgaaatgtacacataaaaataagacacttccaaaactgctttggattgtaattcaaataaaaagtcaatatttacgaagaaaagactggccaggctcaatggctcacatttgtaatcccagcctgttgggaggctgtggcaggaggatcacttgaacccaagagttcaagatcaactttgttttggacaacaaagtgagacccgtctctacaaaaaaatataaaaatcagctgagctggtggtgcacacccgtagtcctagctactcaggaggctgaggcaggaggatcgcttcggcccaggaggtcgaggctgcagtgagctatgattgcaccactgtactccagcctgggtgacagagcaagatcctgtctgaaaaaaaaaaaaagaaagagagaaagaaagaaagaaaaaataaagaagggagggagggagtaggggagggagggaaagaagtcacagaggagaggacagaagtagaaggatacaagaagggcgggtgggggctgccactgggggacaggggcttgcttcccttcaccgtccttcccgcatccccccttgaccatttctctgttctaatccagcctggattcacatttctttttcatttttttttctttttttttttttttttttttttgagacagactctcaccctgtcacccaggctggagtgtagtggcacaatttcagctcactgcaacctctgcctcccaggtttcaagcaattctcttgcctcagcctcctgagtagctgggattacaggcatgtgccaccacgcccagctaatttttgtatttttagtagagatggggtttttccatgttggcctcactgaggctggtcttaaactcctgacctcaggtgacccacctgcctcaacctcccaaagtgctgggattacaagcgtgagccaccgtacctggcctgaatttgcatttcttccttaatctcctcacatcttccattctcctctcacttcccatttattctcctctgcatttccattcactctcctagtggtcaattctcatttcaatttctctggtttctcatgttctgcctgtctctgaggattctccccagccccctccatgaggaggaccagagccagcccttctgtgctcgtgccagtgtacaaccgggcttgccaggtacacactgcgtgcacccgggacgcccaaatagtgtgaacaagccgcgttgcggttaacagccccatctgtcatctgccctcttctggaactcaaagtgttcagcagagagttgtctgtgtatcttcttctctaagtccagataccacagtgatgaacaatatatctgccccttgaccagcactggccaacatgtagaagaaatgcatccaggatggggtctaaaaatctggagatatttcacgcatttggggtgggtctcagatagggacccaggaacacccagtactagctgaatgtctgtactgaatacgtcagcagaggtggtaagagaactccacacacagaggagaaaacggagctgaaggaaggaggtgagtgcctccaactgttccgcatcatgcgtttactgcatttaacttgctttccctttttcctcttttattaaagcaaatctcctgctatgtttataactcctttcaacggtacgtcaacggtgaagccaaaattctatttaacattgctcaataattcaaattccatcaaacatccatcaaaatacttttataagccgctgatatgaagcatttcgaaaaggtgcacatttcatctctccaaacccacacaggaactggttggttttcttttgatattaatttgaaatgctacagtccaaaagattaggattcctgcaccgacttagtgagtttttcaacttgatccaccttgaaaacagacacattgtttttattctatttgatggttattgcaaaagttacaagcaaaccaataaacagtttatgtcatcttaaagagatgccttggctgggcgtggtggctcacgcctgtaatcccagcactttgggaggccaaggcgggcggatcacgaggtcaggagatcgagaccatcctggctaacatggtgaaaccctgtctctactaaaaacacaaaaaattagccgggcgcggtggcgggcgcctgtattcccagctgctcgggaggctgaggcaggagaatggcgtgaacccaggaggcggagcttgcagtgagccaagatagcaccactgccctccagcctgggcgaaagagcgagactccatctcaaaaaaaaaaaagagatgccttggcagatttctggcatatggaaatccttctccatttttctcacagagaccctccaagagaaggtgaacatggtaagccctgccacaccatgttacagagattctccagaaaggaaaatggtgcagaaactgggcacttggcaggatggttgagcccaggcctctgctccgtgagctcccagctgcaccacctctctgcttttcccatccctgagacccttccagctctaaaattctacgacattacctctgagataaacaacagaagaagagcaggacagcaaaaatggagagcaatgaaaagtatggccaggcacggtggctcacacctgcaatcccagcacattgggaggtggaggcaggaggatcgcttgagcccaggagttcaagaccagcctggtcaacatagtgagctcctgtctctactagaatattttttaaataggcaggcatggtggtacctgccaacagtcccagccacctgggaggctgaggcaggaggatcacttgggcccaggagtttgagaccagcctgggcaacatagtgagatctatatctctacaaaaaaaattaaaaattagccaggcttggtggcacatgcctgtaatcccagctactcaggatgctgaggcaggaggatcacttcagcccagcagccggaagctgcaatgagatatgatcatgccactggactctagccgggacaaagcaagaccccaactctgaaaaaagagaataagagtatacaatgcatgcgggacttaaaatctagatgatgggttgataagtgcaacaaaccaccatggcacatgtatacccatgtaacaaaccagcacattctgcacacgtatcccggaacttaaagtaaaataaataaaaaataaaaaatgtttttaaaaaaggaactgtgttagaataaaagacacttgagagactgaaaaactatagaaaaaaaaaaaaagaaagaaaagcttaaatcaagcctgagtcccaatcagagacaggaaatggacttccattgtcttcccatttttttgggattttacacagacacgaattaagagagactatttttcttttgcctccagatcccttcttccaccttctgtgtaatcatctgcaatcatctcaagcatataaatagacacttttaaaagcacccccacctcaggaggtgtccaaactgggttttgaaatggcaccctggaaatccaagatctcctgaagatgcaaggcatgacataaaatgaggacgcagtgggcagatgtgatctctgagtaatggctggggcttcaggaagctgacccctgaaccaaacaagcaagcatggtggctgcagaattatggcccatgaaagagccaaagggtgggattaagagacagatggactcccggctgggtgccatggctcacgcctgtaatcccaacactttaggaggctgcggtgggaggctcccttgagctcaggagttcaagaccagcctggacaacatagtgagagaccccatctctacaaaaaaataaaaataaaaattatctgggcatggtggcacattcctatagtcctagctactctggatgctgaggcaagagaatcacttcagcccaggaattcaagactacattgagccataattgccccactgcactccagcctggacaacagagcaagaccctgttccaagctgggttttgagatgacactctagaaatccaagaaaaaatttttttttttttttttgtagagagatggactcctaaagacagtacttgggagtggagaaggaattatctacaagggaagaattaaagagaatgaatgcatggtagggcactgacctcatcaaccaaggaatctgagatgaggcctgccatgaacaacactggtgaccaccaatctgatatggggtctccctgttgactctatcccagcattgtacagaagtggattggacagaattactgcaaccaccggcgttacagggtttcgaagacttttattctgcatttaagagatttacaggaaatctccaggcagttaagctgcggggctgagcgtgcctctcagctggctggaagccaatcatttggagggtcgttctaattcctgggatatgcagtcatacagtcaggaagcagccctgaccccgctaaggtcagtgtcgtggccaactaccctgagctcaatttagagacataactatggcaacaactgtgcccaatcggttattagaggagatttattgacggatatgcttgaatagcagagccattaattgcaattaccagacaagacactttgttcatctcggggaactgaatgccaaaatgccctaacaactttaaaatcgcatttgctcttgggcgctccgctggtgtcactgcacctgcccagcttcccagtcctgagatggagaggataaggggctgagcctgacatggcaccagctggagaaatccacagtgctgggtcctgaggcacgaggcagaggaaccttccatagaccctgcaaggcccttcacagaggtgagggaagcatgagctgtcccgctccacccagcgccccttctccaggtctgttctcacactgctataaagacatacctgagactgggtcatttacaaagaaaagaggtttaattggctcatggttttgcaggttgtacaggcttctgcttctgaggaggcctcaggaaacttacaatcatggtggaagatgaaggggaagcagccatgggagcaggaggaagagagcaggctgggtgcagtggctcacgactataatcccagcactttgggaagccaaggccggcagatcacttgaggtcaggagttcaagaccagcctcgcaaaaatggcgaaaagctgcctgtactaaaaatacaaaaattagctgggcacggtggtggacacctgtaatcccagctactcgggagactgaggcaggggaatcgcttgaacccaagaggtggaggttacagtgagccaagattgtgccattgcactccagcctgggcaacagtgagactccataccaaaaaaaaggaagaaagcgaagtggaaagtgccacacactttttttttttttttttttttgagatggagtcttgctctgtcgcccaggctggagtgcaatggtgcgatctcgcctctcggcaacctgcacctcccaggttcaagcgattctcctgcctcagcctcccgagtagctgggattacagacgtgcagcaccacactcgggtaatttttgtatttttagtagagatgggggtttcaccatgttggccaggctggtctcaaactcctgacctcaggtaatccacccacctcagctcccaaagtgctagggttacaggcgtgagtcaccacgcccggcccaaagtgccacacacttttaaacaacgagacagtactggcaggggggtgctaaaccattaggtaccacccccatgatccaatcacttcccaccaggccccacctccaacactggggaatacaattgcacatgagatgtgggtggggacacagagccaaaccatatcagatctcaccaacagagcactggaatatcttctgcctttgctctgccaatccacacctgtcatttcctttgagatttccctaagtggccttgctatgtttggtggtgttcggccctggctctaatcactttgtggtcccctgagcctggaagagtcagtccctggatatcagccttctggtcttcctcagggcagcctcctctgaacaccccatttctctaaaacaggaacctccacctccctcatgtaccttccatcccttcactctgttctagtttcatccagcactgaaattacacttcgcattggtctgcctctttgcctgtttatttccgtctctttcactagattctaaggtccaggagagcagaaatttggtctattccttccaccactgtatccttggtgccaagtacagcacccgacacacagctggtactcaaaaaatacttatttttttgtttgtttgtttgtttttctctgttgtgttcttgtttttgagacagggtctcattctgtcgtccaggttagaatgcagtgacatgatcacagctcactacagcctcgaactcctggcctcatgcaatcctcccacctctgcctccaaaagtgctgggattacaggcatgagccactgtgccccttgagaaatatttgttgcatgaatgaatggactcagtacattctgaagttgtgcttacagggaccttctctatccaactagatcatggcttctgtgaaagcagggattctctccctactcatcccttcttcctcagcaccgtgcataacttagatgctttaaaatttaagcaagtgaggccaggtgcagtggctcacgcctgtaatcccagcactttgggaggccaaggcaggcggatcatgtgaagtcagaagttcgagaccagcctggccaacgtggtgaaatcctgtctctactaaaaatacaaaaaaaaaaaaaaacctagccgggtgtggtggctggcgcctgtaatcccagctacttagtggggctgaggcaggagaatctcttgaccctgtgaggcagaggttgcagtgagccgagatggtgccactgcactccagcctgggcaacagagcaagactccatctcaaaacaaacaaacaaacaacaataaaaaaaagtaagtaaatgaatgacattgtgaaccacaaacactatccacacatcagaataagaaaaagcacatgtccaccacttttctagggaaaaataagagctaacacttaaagaatgctttctcccgggagagttgtaagtgctctccaaggtattcattcataaaattcacaggacaacactaggagttgggggatagaattttctgctcgtgaaaggtgaggacttggagttacacagctagcaagtgacagtgatggaaacaggtccaggcactccagacagaatctctgcccttaacccccatactaggctttctctttcttctgactttgaaaactaggataaattcaaaaacaattagaaaaacatcccaagagaggactttgggtgctaaccctctgctctgctcccttgagtttatcttttattttttctttccaagtagattgcaagttacaaatccctgctccaaattaagatgtcacgtgataatctctcccttacaggttaaacttcaagactatgcttaacctgcggttagtgaggcacatgaaggtctttccaagagagagttgaatgcagctcttccccgagctgtaagaatgcaaccccagattaaattggcagagcgaaggcgggagcaggcagagacagcttggactctctgccaagggtgtagagtacaagaatttccagctaacaaagatgaacttctccactgatgcaaaactggccccctcaggtgtccttgtgatttacatcatttcagtgttaatatgcaggggggcctttgataaataagaccctttaagtaactggaattttctatactcaacactaatgcccactaatgttaattaagtatttattgaaatcaaaatttctggccaggcgtggtggctcatgcctgtaatcccagcactttgggaggctgaggcaggtggatcacctgagctcaggagttcaagaccagcctgggcaacatgacaaaatcctctctctactaaaaatacaaaaaaattaaccgggcgtggggatgcacacctgtggtcccagcaagggaggctgagatgggaggattgcttgagccgagggaggtggaagttgcagtgagccaagatcgcaccactgcactccagcctgggcaacagagtaagaccttatctcaaaaaaaaaaaaaaaaaaagaaaagaaaatcaagatttcctcagtggatccaacaacccacataaatataacctttgataacccatagtgtctaccatccagttctctattttacacagttaaatggagcaaagtgatattgggtagacagatctgaagtactacaagaatctactagtaccatgccagatgctgatacaacattgtggacgaccccacagaatccacagtctatagaagggagtggccattcatccccaaactacacagataaactgcaactatagcaaggggcacatggtgttaagagagggtaaagagattttaatctggtcacagaggtcaatgaaggcatccctgagaaaatagctctttcgttaagacctgaaggaagagtaagagaatgaatggggagtagggagagacagtgaggacacggagcttggtgcagctggaaaaccaaagtgtagattggtgaggatgggcaggtgtgatggggctgaggctggggcagtgcccagggacatcaggctggacctcgaagatgaaataaatgtctggatctttatgagcagccactggggacctttaggctctttcagaaagggaaagattcgaggattatgtagaaggtgaaactgacaacctgctatgcatccgttctgcacacttgctgaggcaggagactggacaaacacactaaagagagaaaaagaaaggtcaacagcaagggctgaaataaaaaggacttgctggcccatcttaaggtaaacagaaaaacactgagggcacacatctccagagtggtacagtcaggccaagttttgctactctcagctaactgcaaatgtacacttctgcaaatggcccagaaacgaatctcagagcttgataacaatgagtcaacccatcttcaaccatggagatgggttctattttgcactgctctcactaaaacaaaacaaaaatctaggcgggacgtggtagctcacatctgtaatcccagcactttgggaggccaaggcgggcagatcacctgaggttaggagttcgaggccagcctggcaaacatggtgaaaccctgtctctactaaaaatacaaaaaaaaaaaaaaatagccaggcatggtggcacgtgcccgtaatccaagatactcaggaggctgaggcaggagaattgattgaagccgggaggcggaggttgcagttagccaagatcgggccactgctctccagcctgggtgacatagtgagacttgatctcaaaaaaacaaaacaaaacaaaaaatccaaaaatctataacatagctattattcttgcgatgacaccaacattattatgcatccgtagagcaggatacttgttttaatctgcacaaaaatcacagcatgttcatgctgggaggaaacttaaacattatctgaatatttgtgtacttttccagtattctcacagatgttttcatatatagtttattttctgttaacatgtatgtttggtgtcccctaattaaactacgcgtgtttttcatgtgggctataccatgtgtactgcctttcaagttaccctcattcccatctaagcaccagtggaacacacacacacacacacacacacacacacacacacccttccccacccacacacacacgactgtactcagaggagcttaatcaacactgttagttgactgacttactgacaacagaccaaaggctgcctctgagactgatggtcaaagccatgaaggcaagagatgtatttagtctccatttaaaagaatctgattcggctgagctcagtggctcatgcctgtaatcccaacaatttgagaggccaaggagggcagatcacctgaggttaggagttcaagactggccaacattgtaaaagcctgtctccactaatataaaaatcagccgggcatggtgacaggccctgttattcccagctacttaggaggctgaagcagaagaatcacttgaacccaggaggcaaaggttgcagtgagctgagatcatgccactgcactccagcctgggcaacggagcaagattctgtctcaaaaaaaataaaaatgaaatgaaagaatctgataaaaatataagggagccaggcatggtggctcatacctgtaatcccagcactttgggagaccgagtcagaaggagtgcttgaaatcaggagtttgagaccagggtgggcaacatagcaagacccccatctctaccaaaaaaaaaaaaaattaattagccaggtgcagtagcatgcacctgtagtcctggctactctggaggctgaggtgggagggtcacttgagtccaggagttggaggctcagctaggagtcagtaggtaggatcaggccattgcattccagcctgggccacagagagagaccctgtgtcaaaaaaacaaaacaaaacaaacaaccataggggagagatgaaatgaaccgccaaagacttgctccaccggctcttcaaaggatgggaaaaaccaaaagcggctagaacctgaggccccagcccctctccgtgcaggaaagttggttctgtcactcatgggaagagtggacctggattaaacaggaaagctgagaaggatgccacatccctggttaaaaggtcagggggaaaatgagtatatcaagcaaactgagaggtgttgcaatttcagaagcaaagtaattttcttagatgacagcataagccactttcagctttttcttttctttgatccatcagcgttgccctggccaccaaccaagttcacacagtccaagcagacattctggattgcatcaacatgttagcactcttcgttttcaaaatgtagaccatatatagctaagattaaacctgtagcaaccagcccctagatgtcattgttgctgctgaaatatcaactcttgagtcttggaatttttacatctgaagagatagcagtgttcatctgaataagccccttaaataatgcaaattcaattcactttcggtttttcaaagccaagtccaaagtcttctggacttcttaaccaaaatgcaactaaatcttagggtgttagcacacattcagttgccaacaaaatccgcattcaggaaaaataggctgaaaaacccacgtagtcgtatgtgacattcctaacgtgctcacatcaaattccacgacataagctgattatggagtcgctgggcgattctgcccttcttcttttcgtgtgttgtctgacttctgtgcctgcctctgtcatcggtgtctggagctcagagccgtctgtgccttgcgaacagcagcttccaatcaagggcgcgtggaagagcagaagcgcccaccctgtttccaacaagccattgaatgcgacatattctttgttcacagtgtccttcaactccatctcttccttccatttcatatcattccagtcccagtctttgcaagaacaatactttattgtttactgattgctttctatgagtcagacacacattcggttctttaaacttttcaatggccctgtaaggtaggtatgaagtaactgaggcacagagaggtacagtaacttgcccaggacacacagctagtgagtgctaacaggttttgaagcacagggtcaatgaaaaccggtccacagactagattcttagggcctctctgtggccaactcccttgtctctaactggatgccacgtttattctctttccaagcctccggccctcaatctcacaccctatcttcccaaaagatgcttttgagtagctcctccaataaactttatgcttgggagcatgtctgctaaatgaaatcacttttttcttcgatcattcagtgtttactgaatgtagctacattttaggccctgttctaggccggaagggcaggagagatattgatgaacaaaactgacaagctcccctgggctcttgaagctcatttcccaccagggtagacacgtgttgaggcagtgattacacatggaattaatgacaagagagtgaagtccacaaagacgcaggaaatcacacaagcagagcgcccgacatgggccctccaacagaaggccctcaacagaggcctgctgcctgtctctgcctggcccagtcccagccccaatctgcctttctggccagagctcttcctgctccccatactgagtcctccaaccccagcagaggggtctccacgatccagatagatgccctgtgtccgtgtgcacctccctgctccattcaggttggtccattttcttccacgtgccaaggtgacccattcttgaacttaggtagctcagattctgctttcccattacctggtcctagggatgtccctgcaggtggcctagagatatgagtggaaggaggaggcctgatgcaagagggatggacatggcagcctgaccacctaatcatgaagcttcatgcaccccacagctccactcatgcctaattctggatgcaccacttatatctggcgacagatttctactgggccttcctgccttctggccttgtggagctgaagatgaggccagaaggggcatgcaatttgctatttgcagtgtggatgatacggtttggctctgtgtccccacccaaatctcatctcaaattgtaatccccatatgtcgggagggtcctggtgggggtgattaaatcatgtgggcggacgtctcccttgctgttctcatgatagtgagtgagttctcatgagatctggttgtttgaagtttgtggtacttccccccttactctgtctctctcctgctccaaccatggtaagatatgcttgtttcctcttgcctgatgccatgattgtaagtctccggaggcctttcagtcacgcttcctcttaagcctgcagaactgtgagtcaattaaacctcttttcttcataaattacccagtctcaggtagctctttagagcagtgtgagaacggactaatatagtgaactttctctgggtacgatatgcattttttcctttcctttatcactcatgtctctttctcagtgaaagaaacatcccaggctgggcatggtggctcacgcctgtaatcccagcactttgggaggccaagatgggtggatcacttgaggtcaggagttcaagaccagcctgggcaacatggtaaaaccccatctctactaaaaatacaaaaattagccaggcatggtgacatatgcctatattcccagctactcgggaggctgaggcaggagaatcgttggaacccaggaggcagaggttgcagtgagctgagattgcaccactgcactccagcctgggtgacagagcgagagtgtcagtgtcaaaaaataaaaattaattaattaattaattaattaaataaacatcccagaaggtcaaatactataccatgttccctctgcttggtcttccccagtatacgaagagctcaagctgggaatcttagaagatagactccttgcaatctgcagttatccatttactgatgtcttaagcaagaagtagaactcccagccagtcggtgatgatgccagcagctcctcctagtctatcacctcaaaaggagctgtcaaaataacaaatgacatatttttaagttgcaggattaccccttagctgggctttcttggtttgattagcagttacttttccttttagtgtctttcttcatcttctcctccttcttcttttcattttcttcctctgctccactcatcaataaaggccactgttttcaggaaactgcttccctaggaagaattgaacagtatactattacaatcatattgtcttgttcagaagcaggtggtattacctgtcaacaggggtttggggcagagcaaatagctcccacccagctcggtgaagccactccctggctcctgggtagagaaaaatggccaaagaagagagctctttggaggcctcaaaatctcattttcattccctttgcagagaagagactgactttattgacaaagacgactgaaaattgcttgagcgttccaataaccagtctgcgttgaggcagaaagacagtctggcggaggcaagctccctgctccaccgctagctccgccgagccacgctttcctgcagcaccagtctgtggcatatgcagactagactgaaaggagcctcctgtcggcctcaaaagcagcccccctccacctccactcccagcctgctggtgcgtttcctggatcccaatcacaaatcaacacgaatgcagggaatctctgccagacaccaaactcttaggctgattcaggagcttggggtcaggcctaagttggcttggaccaggcacaggtcccattttccactggagtgccctgtggcttggctgcacattgcgcgtgggccactagatgtcaccattattgattcttgtccttatacccaggtcctgagtctaagacagggtctcagggctaggagaactctggagagaattccatcgcagcgttgactgcagggctgctatatttgctatgtctgagttcctcggtgggccttttctaaataagttagcatctcagccccaaaacagctgagctgcaaattaagcaaagaccagtattagccagagccaaccctgattttcacaatcacgtcccctgccctttctcctcctcttcatcgtcagggttggtcattatgcatccttctggtttacttgggccctcaataagaaataaattaatatgtatgcctcatagcaccaaggattttagatgttgatgtgctgttgaagaaacataggtctgtggcttttagcagagaatgaatgacagagggataatttatgatggtccttgagacctgaactacaattatgaagtatttctaggtgtatattcaggatgcaaagtgcaaggaacccagagctaatgttaatttattactgacagctgtatatataataatatatcacgtcttttcatcttacattccttctgacttacatcaagcaatcttttcattcattaataaaatcaagtcttgccattattcttaatgatgaagtcccatcttgaacccagaggactcctatcattaaactccgtgcttctatataccagtcatctgaagctcaaaaaaaaggataaattgaacttcttgttttacaagcaaggtgaaaacatcggaaagatagagcccacttgctcacagtcccacaagggctaagtagcaaagtcagggacaatttcggggtttatttttctcagctcgcactaccacatccttttttgccttttagctctcttgcctcctctcacctttctacaatctctccttttttgaggcagtatttttttttttttttttttttttttttgagacggagtctcgctctgtcgcccaggctggagtgcagtggcgggatctcggctcactgcaagctccgcctcctgggttcacgccatgcctcagcctcccaagtagctgggactacaggcgcccgccactacgcccggctaatttttttgtatttttagtagagacggggtttcaccgttttagccgggatggtctcgatctcctgacctcgtgatccgcccgcctcggcctcccaaagtgctgggattacaggcgtgagccaccgcgcccggccgaggcagtatattttttaaaggtcatgataaaaattacaccttaaagaaatacgggccacacgtctcgtccaattttcggttctgtgccaaagacttacatgattaatcccttcaaaacaaatctaatctaatcttatcacaccaaagacaaggtgtccttcataagtattgtggctggaaacaagtaggtcttcctccagtttcaactcgttcaatgtctcattcagtttacaaccagtcatcaccttggcaacttactcgaggcactgtcttcagcgttcccaaaacgtaagtagtgctccagttcagcttgtaaaatcatcaaactccgtggtcactttaggagatacagagacccatgatacttgtagataaagcgaaacctttagcctcatcgactaattaatggcctcaaagtaaaataatgaggtgtgtggagatagggattcagttactgggtcatctctcatctggagacacaatcagattccactgaataggcgctagataactgaataagcgagtttcctatctataatactaaatcttactaggattgtttaattaaatcatgataaataacactctgtggcaggtgagaggtgctgagaagagcttaggtgagatgtccacaagttcaatggaactacatctgaatgcctttgcattcttctgacttaaaaatgttgactgtaactttccagagagttcttttctaggaaagagaaatactgaggtgctgtgtcccaggctttttgaagttgtcttggttttcctatcagattctgcattgtatactttctcagtcttcaggaatgaaggtcctaattccttcattatcattcctttctgcctataatgatttcttcctaatggctctggctgttccaggtacatcagagtagggagtgggtatcagtggctgtgtcatgctacagtaacaagcagatttctcaaagaactaacattagaactaccattccacccaacaatcccactactgggtgtatacccaaaggaagataaatcattttaccgaaaagacacctgcactcatatatttactgaagcactattcacaattgcaaagacatggaatcaactgaagtgccatcaatggtagactgcataaagaaaatgcggtacatatacagcaaggaatactatgcagccataaaaaagaacaaaatcatgtcccttgcagcaacatggatgcagctagaggtcattatcctaagcaaattaacacagaaacagaaagcccaatactgcatgttctcacttataagtgagagctaaacatggggtatacatggacataaagaagggaacaatgaacactgcagatcccaaaaagggagaggcagggaggggggcaaggtttgaaaaactacctatagggtacaatgttcactatttgggtgagggaatcaatggaagcccatacctcagcatcatctaatataccatgtaacaaatctgcacatggacctccctaatctaaaattgaaggaaaaaaaaggccaggtgcggtggttcatgcccgtaatcccagcaatttgggaggccaaggtgggtggatcatctgaggtcgggagttcgagatcagcctggctgacatggtgaaaccccatctactaaaaatacaaaaacaagccgggcgtggtgatatgtgcctgtaatcccagctactctggaggctgaggcaggagaatggcttgaacccagcaggtggaggttgcagtgtgccggaatcgcaccattgtactccacccgtggcgacagggtgagactctgtctcaaaaaaacaacaacaaaaaatcagctccaaaatcatcagagacttgctcaccctacatatccaccaccatgggtcagctggggactcagctcatcattgtccctctaagatgctggctgacgggatggccgccacctgaaacactgccagtcatcaagccaaagggaaacatactctggagggaactgcactggcaattaaatgctccagtatgaagggaatgccctcactcccacacacgatccattagccaacaccagtactggccacacccccgagccacagggtcaatggaaactaaccttatgccagaagagggacaatgggaactagctggtgaataccagtaatgaccaccacaggaacttcaaacgaagatacactttcgttcgcttgttttaaaagttctttattatccctagattatattttctctattgtgtttctgcactctcccttgatcaaataattctgtcatttcgtctgtctactttcagattcatggacattacacttaagacatgactaacgaaaagcctctcttcagataatgataagttaggattgtttgtgccaatagcccaaggcaaggaatttctcatattacttgtttgttctccctttcaacacttcgtatttctgggttttcttcactgttttttctttccacccttccatgctagtctcctgctcaatctcttaccttttatcgaaaaaaaaattactcaacattttattttttcacagctatttggtctaattggcaaaggattctgtggaatagcagaattctaactttgcagccgggcgcggtggctcacgccggtaaccccagcactttgggaggctgaggcgggcggatcatgatgtcaagagatcgagaccatcctggccaacatggtgaaaccccgtctctactaaaaatacaaaaaaattagctgggcatggtggcacgccctgtagtgccagctactcgggaggctgaggcaggagaatcacttgaacctgggaggtggaggttgcagtgagccgagattgcgcccctgcactccagcctggggagagagtgagactctgactcaaaaaaataaaataaaaataaaaataaaaattctaactttgctggtttcctaacccccaaattcagatgaatttgaattctgaaatacagtaacaggaattatcagcctgtctgattctaaattttgttggatcttcctcccaggaccgtggacagcccagccagctgtaaaggcctctaaaaagatctggaacagatccccaagaggtatctcaccaaatgagtccattccactacaatggccagaatcttcagttttacacccttgctcatgcccaccgctcacccggagtccagacccaagcaccatgctgcgtagttcctaatacggcaaaactatccagcatttttggtgaaattggctggaatgcttcacttagtccgtttttcactgttagcaggagaaccaccctagtatctttcatagaacagatccgaatgacaaacaccatcgtgccctcggagggctgagcttgtgttactgggtctggtcctacaaaccctgaaaatcctgaatctctcaagcaaagagattccccagggccagctctggcccttaacaggcaccccttaacgccaagctgcgaatctggctaggacctctatattttagccaagaacaccttgaaatgtacagtcctaccaaaggaactaatacaaatccagaagcacaaggctaaagaaaaaaaaaaaaaaaaccccaatgcccattgttgaaagccaattgcggggtgagtggggtgataaggctagcccacagcggatttaggcgacgtggggagatgccaaagtgaatacacggtgacttctaaatctagacgtctggaaggggccatgagagccagacaactgggcccgaaccccgcccgggagccagggtttgcaaggggctaaaccggctggggagcctccctctcgcgggtccagcctcggcggcccgggacgccggtaggcggggcctgagcctcgccccgcccccgctgcccgccattcgggtcacctgacccacccgcggctcacgtgatccgtccccagcgccgccattttggagctccggatgaggagggggaaaccgggggaaaagagggaaaagagccgggagagaggtgggcaaggacgagggcgagggcacggccgggtcctggctggccaaacgaggctcgcggaagcagcagccgccgcctgaccgcaggtaccgcgccccggggccgcccctccgcccgctgttagcgccgccgccggccatgtgcatcctcccctcaggcctctgccggcgctcgcttcctcctcagccggccgacccccgcccggtgctagccacaagccccaagttccgtgtcccggttctgtcttctgtgcagcaaggcctgcggagactctgggcttgccctgcagctgggggtggggggaacttgctgctccctgcatactgtcaccagcccggcccgcccgcaggcgttgcttccttctccaggcgttgcttctttctgcaaatgtgagatcgcttaggccagccgggatggacccagccacgatgttctcacagcatcttttgattaattttctaagctccctcattcccgacccatcacctcagtcctttagccagtgcgtggtgtagaaaaagctactacagaaacgcagccctggtcttctgcatttattaccatcctctggagatagaatgatgtctccagagatcacggagaccatcagggaaagttcccacctcttaagacctgggggcatcggaatgaatggtttgtgtagaaggccgggatgattaataaggtggcggccactttcccaaccccaaggcggtatttttaagtttctgcagtgggctgtaatttgctatcagtctgcatcgctcttctcaggcaattactggatttatcacctctttgagtttgcactttctccagtactcccctctcactcagagtatgggttgcattattgattaaaagaaagcctggcccttcattcctttacctcactaactcgttgaaaattaacttcaggggagccctaaagatgttttttctgccctggcagtgagctattttacttaaccgtaatcgataaggtagttgcattctaggtgaaacgaataagcatttttttatcttttagatttattccagccagtataagaaacagtggcaaagaaatgtaggaccagagtaggaaactgcgttagaagatatataggtcacaccactgtgtcatatctttttatgctgtttttctgcctattgtgcttggttgcagaatcactcgttagattgtatttttagtttagattaaaatagcaatgtgcaatttattgttccattctcattagaaaatgttgtcagtaaaaccaatagtgttgagtccagtacctaaattctgaggtaaaacaaaatacacaattattgggagaagtttccagagctattttttcctaacttctgcaaaatcctcaagtcggcttgttagataaattatttaaatttgcattacgtaatagggttgcatgaacattcctctgaatttctttttacatggaatattgagaaatttttcactgccaaaaaaaaaatcattactttgtttcaccaagaaagagaaatgttttgatactatatactttcgttcttggccacagctggattttgaagattgatccaagggactgtattaatttcaggaattgatttgaaagacactggctctgccacttaacagccatgtaaccttgggtaagtcacttaaaccacactgagtgtttccttatttataagactgtataacacccacctagcctgtcctaaagagttatgaggatcagataccactaacatgtttgatagagcctagctgtaaggagctgttactcttttcagtattgatattttgtacatttttattctcattgagaattaagatgaaaattggtgtattagagaaagcatggttttagagtgagattggcctggattcctgttcttaaaccagttaccactttgtgtctgtgagtctcaggtttctcatctgcaaaaaaaaaaaaaatacacaaaatttgaatattacacaaaatctacagaggcattactccctagacttgcacctcatgggcaaggatttcctcagtcatttttgtagtccccagcattctggttggcacattataggtgctcaataaatgacagtaaatctgaatattggttaatgttagttagaccttatgtcttcattgcagctgccaaattagaatattctctcaggctatgtgccaactaagaaactctagactatgaaactccatatacttgtgatatttatactcatttttttcttagtggtaattaataattaccttgggctcagaagattttaaatcaaataaattgtagccaatatagtgaggtaaatctataaataatgtgtaagcagtttccaggtaactttatagacagtttataattcagggacctgaaagttcatctagcttcaccctcttgttttacatctgagcaatctaaaactcacagagacagtgacttgcctaaggtcacacagctaattgagggcactttaggggagggacccttgagcttatgtcccctgccttcttttggctggagcaaaataaatttgtcatattttagaattacaataatctggaagaatggggaatttattggccattacttttatagcacaatttttttttttttcccattttggaaaaaacaaattcttgttctgaaagagaaggttcttttgtatcatattgtacttttcttcatataaacacagaaaattacagccttttctccaggcccacatgaattgttcaacttgattttactcatgatgaccatactactgtaattataaagaactaattagatacccaaataaccaaatagcaaattataaggaaataaagacaactgaaataatttggctcctaactttttgtgagaaagatattaattagaagcatttgcctgtggaatactgttgtcaaggaaagatttgagagagttggtggaaagggttatagaacttttctggtttgggatacaacttttgtttattacttatttattggtaacaatttaatatatttaatgttgttatgtctaaacattacaaacaagaaatctcctgttttgctaatgcctgtcgtcttctttcctcctggtgaactttcctattcagccatatcgatcttttcactcacccccagatagcatgcttattcttacttctaaaaatatagtcatgtcatggctgcttttctggtcactgctacccttgtgtcaacttgtatcagcagtattccaaggaagcaaatggcacgttgaaatgaggataattcaaggaaggtatatttacaaagatattagtaataaaggtgttggacttcaataagcaaaccacagcataatgcagttatctggagctagcagcattaggagagggagaggcatcagaatcagaagaagggtcttggagagcagcctacctggaaagaaatagccttctattgaggaacacagccaatccaaggtgacctagaggtagagaaccaggacgatgaatattctgatctcactctgctacctccctctgatctgtcatggttcttcattggctgacctcaaccagaaggcagaggacaggggagcctagtgatgtaatccctctgacagagagcagaatggaaaggaggatacagtgagcctagagggcaaatggatgatgtctggcatgctgcccatcctttgggaaccagtggacatcttacctctccatgaagcttttgcttaccttgctagcccaaaagagctcttcagtatctttcaggatttagtcattgactgttgccttttattttaccttgtgtaccattgcgttgtttaaatgctgttactttttaacttccaaatgtttgccttatccactcaactcagttttaaactgcaagtattaagaatttaaaatttttcctgatactttgccttgcgccttgcacataacaatttgtttgttacacacacacacatatttgtatttctgcattagtggtctaaataaaatttctgtgattttaaggaatcaagaaagttgaaggattggccttaaggtaacttcccctctgtgtatactttattatgatctgtttagcctttttattatgaaaaatgttaaacatttacataagtagaaagaacagtgaattcctaggtactcatcatgcaacttcaattacagaattagtcattctttctttattctcatcctatccaccccaccactgcagtatcaccaaggtaattgttttaaagctgtgcttacactgatctcttggaggccaaggagagtatgcagattgtcatagtttatgttgtcatcactattgagccactgacattgtatgtatactccttatttcatctcttttgttcagatttgcttcacttgacacacaatctcatatatatgtatttctgcattagtggtctaagtaacatttttgtgaaaattgaaagagttggccttacagtaacttcccctctgtgtatactttattatcagctgtttatctaaccttttttttttttttttaacagagacttgtttttatgagattaacctgtgcattgattttgcatggggacccaaactggtttttcaggtgtttcctgacgtatttcatgttgtcatatctgttttatagctgccattactgtacttatccccaaatgtatgcagcctttaaaatgagatacttacataaatgttcagggaaaattggagcatctgctgcaaatttccattagctcttaatgcctgagccgacacagctttaaaaatctgaatgttttgtcagattcttttgtattagtctttttcttgagttaagatgaactcctccttctcttcatttcactttctttttaaggtacacactgaaatatccacagggagcaatttgcactggtctgtgtcacttctcttattaagtagaagaaagataacatgagtcacctttgtaaccctacgggtgtgcaaagtctcttgagcaaacattcacttgttaacctccagatgatcagtcagcctacatgggtgttacatttcatggggaaggagaccttagatctacagcagagagccgtatcgtgttcaggaggattcctattattaaacttattatttaatcaatttgcatttaaccattgaactgacagacataaggccttaagttaatcaccttaaagggaaatcagtagtcacatgaagagccacagctcctcttggcctaaaaatgtggaattctaagacaataaagtgacttaggaagtcacaaaagggtttttctaaggaaacaaattgttcccccattggtctcctctttaatgacttacagctgagcgtagagatctaaaaagacttttgttccttctacctgagaaagatgaaacagaactagtcttttgagagattgtttaagggagagtggctgaaggaccacgggcctttgggagccagggtagctgtcattgttggaatggccatggaatgcatgtgagggcagttagagacagctagtagccaagagaaaaaaagctgatgccatagggcagagtattattaggaagaagggaagaaatagtactgaagaagccaagagtaaagtgtttgcatttttgcctgatgtggacctagatctagaaagctggcttgccagaaggagtagaaaatcaggaagaaaagccatagctgctgcccagagttgtgggcgacctggcactgaagctggtcagctgtgtgtgtgtgtgtgtgtgtgtgtgtgtgtgtgtgtgtgtgtgtgtgtgtggcgtgggggggcggggcctgtttttgtgtttgtgtatatgtgtgtgtgtgtggcgtgggggcgggcggggcctggcaggacattaggtatcatcttggcaggggctgaagggcccttatatgttgattcaaccatgcggggaagaacagccatgattcaccacctaaaataagaattcagagcctgggactgaagtttaagaatagtgtggtctttggtctatagctagtgccactaaaaattttgttggcatttattgaatgttgtgagtaagattccagaatgcacctaaaatgtggaaaaacaaaacttgttgctggaaaaaagcctaaacttaaaaatgtgatccaagtcaacaaattaatctcactttaagccaaaggaaatgtttgaaatgaaagtactgccaggaaatagaaagagtattctagacttaggcagaaagatttatgggtattttatgtttagtgacttcctcagccataatgcattattagaacgaacaaataacctcttctaaggactctgttcatatctggaactgaaacacaactgggatatcaattttttccttctctgatgtcccttaccctttcagggaaaaaaaaaaaaaccatatatgtggatatgagtaatagttgaccactaatatgacctctaaaaaaaaaccacagcatagtttgtggtttatcttcaggaagataaaggaagtaaaagtaggaactagattattgcttttatttaatttcatttatatagtactttcccaaattcaatatgccctgtacaaactacatgactatagtttcacaatttcaaagatttggggagaaaaaaaacaaatttgtgattttagtaataaaactgcagctatatttggtataagaaatactctcaagaattgtatcagtcattggctttacagagtgatgtttcacagtaactggaggggtttcacatgccttgagaatggctgtgctcctttaatcaaggaataggagtctttttttttttttcttggcattgtgcaaaagggagggagtacttttggtcctgctggatgctgaaggcaaagaaagtgaagaaaaatggagaaaaagatcatcatttccgaagaaataagtgatagaggggagtatcttcatcattagtcttgatagaagattgcattgtaaagagaaattctaaccaatttaaatctatactggggatcgccgggtgtgtggacatggagcttccagcttagaaaatacttagatgagattacagacactaacattctcttatattttccaaattacatgcctgtaattatcctgtaacctggtatttttctgttttacattatcctttttagatatggaagaaagtagcagtgttgccatgttggtgccagatattggggaacaggaagctatactgactgctgaaagtatcatcagtccttcattggaaattgatgaacaaagaaaaactaaaccagatccattaatccatgttatccagaagttaagcaagatagtggaaaatgaaaagtcacaaaaatgtcttttaattgggaagaaacgcccacgttcaagtgctgcaacacactctcttgaaacccaagaactttgtgagattccggctaaagtaatccagtcacctgctgctgatactagaagggctgagatgtcacaaacaaattttacccctgacactcttgcccagaatgaagggaaggctatgtcttatcagtgtagcctttgtaagtttctatcatcatccttttccgtgttaaaagatcatattaagcaacatggtcagcaaaatgaagtgatactgatgtgctcagagtgccatattacatctagaagccaggaggaacttgaagcccacgtggtgaatgaccatgacaatgatgccaatatccacacccaatccaaagcccaacagtgcgtaagcccctccagctctttgtgtcggaaaaccacagaaagaaatgaaaccattccagatatcccagtaagtgtggacaatctacagactcatactgtccaaactgcatctgtggcagaaatgggtaggaggaaatggtatgcatacgaacagtacggcatgtatcgatgcttgttttgtagttatacttgtggccagcagagaatgttgaaaacacacgcttggaaacatgctggggaggttgattgctcctatccaatctttgaaaatgaaaatgaacccctaggcctgctggattcttcagcagctgctgcgcctggtggggtcgatgcagtcgtcattgctattggagagagtgaactgagtatccacaatgggccatcagtgcaagtgcagatttgcagctcagaacagttatcatcttcatctcctttagaacagagtgcagaaagaggagtacacctaagtcagtcagttaccctggaccccaatgaggaagaaatgctagaagtgatttctgatgcagaggagaatctgattcctgatagcctgcttacatcagcacagaaaatcatcagcagcagccccaataaaaaagggcatgttaacgtgatagtggagcgattgccaagtgctgaagaaaccctttcacagaagcgcttcctcatgaacactgaaatggaagaagggaaggacctgagcctgacagaagctcagattgggcgcgaaggaatggatgatgtttatcgtgctgataaatgtactgttgatattgggggattgatcataggctggagcagttcagagaaaaaagacgagttaatgaataaaggcctggctactgatgagaatgccccaccaggccggagaaggacaaattctgagtctcttcgattacactcattagctgcagaagcccttgtcacaatgcctataagagctgcagagttgacaagagccaacctggggcactatggagatataaaccttttagatccagatactagtcaaaggcaagtagatagtacattggcagcgtactcaaaaatgatgtcgccacttaaaaactcttcagatggattaactagtcttaaccaaagcaactccaccttggtagcactcccagagggtaggcaggaattgtcagatgggcaggttaagacaggcatcagcatgtccttactcaccgtcattgaaaaattgagagaaaggacagaccaaaacgcttcagacgatgacattttgaaagagttgcaggacaacgcccagtgccaacccaacagcgatacaagtttgtccggaaacaatgtggtggaatacatcccgaatgctgaacgaccctaccgttgccgcctgtgtcactacacaagtggcaacaagggctacatcaagcagcacttacgagtccatcgacagagacagccttatcagtgtcctatctgcgagcacatagcggacaacagcaaagatttggagagtcacatgatccaccactgtaagacaagaatataccagtgcaagcagtgtgaagaatccttccattataaggtaagcattggttcaggaagtctttcagaggaccttcgcatcttagagtgagaagggaactttgtagatctaatccaatcacctcattttatagataaggaaactgggtcccagaaaagtttgataagttgcccaaggggatcccaacttaccagtattaaagttgggactgttcagaatttctgctgtagaatccttttccctgcctgctgcctccttgacagcctctgtgttttagtgtgtatagtttaaagtgttgattttctgttgcaagagaattgtagggagtgtatagtggattgacatacgtttgacttaacgtattgacatacgtttgacttaaacaaatttaaccgtacatcatcacaacaaaaaaatacatatttttcatcttatatggccccagaatgccaggcattcagttcagcttctacataaccaacagtgatgtgtatcattgcagaaggaaaaatgggctatggcggacctattaaaaggtactgtcatggaaatagagccatgtgtgtcatgttttatgggcagggtaaagaactttcaagagttattttgactgtctgatttttatcttaagtgctgaccttatcaaaaccaatatcctgtatgaagtgctattcttttataaaggaaacgttgaatcattggtttagaacttttcttcagtgggccaggtgactccttgaaaatgtattacaaatgttatcctaagggctaactaggaggtagactttttccctcagattaccgagagctggggtctagctgtggtaaaaaggtcacaggagggaggccgaggcgggcagatcatgaggtcaggagattgagaccatcctggctaacactgtgaaaccctgtctgctaaaaatacaaaaacttagctgggtatggtggtgggcacctgtagtcccagctactcgggaggctaaggaaggagaatggcctgaacctgggaggcggagcttgcagtgagccaagatcatgccgctgcactccagcctgggcaacagagcgagactccatctcaaaaaaaaaggtaacaggaataagaaagcccttgagtctgaggttcactgcttctcagattacactcatgaaattccaagtaggatgtccacataggctgcaaagacaagttcctgaagtctccaggagtttcttttgctactgagctcttgattcatgggaatggaagtagaggagacaggatgtccttggaggagcacttccagttagatctcttacacatttagatatttcaatgaaaaattaggagtctggtgattactgattggatttttttttgtgaagttgcattattctgaacactctgctcgttcctcctctgggcctaccagtgtttcagtaaatacggacacgccctgtgtaatcacctaagaaaatggtgacttcctttcagagaatatgaagaggaactgtccgttgaatgtgattatgatttgctaatgtacttctttctataaattgtcaaatgtgtcaaatgatcctttagcagacttgattttaaaatatggtaattcgttgtactaggccatgaaagcaatgaacctgttcttctacagcctcctaagagttggacatgtatatttattgaaaattacatatttctttccactttttagagtcaattgaggaaccatgagagagaacagcacagtcttccagataccttgtcaatagcaacttctaatgagccaagaatttccagtgatacagctgatggaaaatgtgtccaggaaggtatctatgtattttgttatgcaggctgcagtgacttgcacatgacataaaagtgcccttagttgtcatggttggttattttcagggcaaaagcctatattctcctccatttttgtaccatggatgtgagtgaatctgatctctgtttctgaggaaatgccaagtactgaatgaagcagatgattactaggtcctaggtgagaagccctagatagtaaggattcatcttcagttgaaacttaagagccccttagaaggtgatgtaccagcaagccagaaaagcaagccagaaaagctacaacatggaaaacaggcctcccctccctctctcggcaccagttgacctactgagaacagagcttttgcagatggtaggcccccaccccaaactttaactggggctccccgctgtgatcttattcttacccaagtatgactgccagatttcatctgcattattaaaaaaaaaaaagcacacacacagacacacaagatctttttatgtactagttaagtagcagtcaaccgagtttctggtaataagaatattagaatcaaaagatttaattagagctccatgaaaaggcggatgccacatccggagaattaaggataaagtgtactaagctgtgccgctttggttcagctcacttaaattgatatactttaaatgtctccagtgtggcacataatgtttatgggagataagacatattggggtgactttcccttttagatttgctaagaattaaagttagaaacgactacagagtgaaatgttttaccataatgtttcattaaattataccccagaaagcataactgattctagaatgcttctgaaagaactgattttgacaccactgtagcaccaaaattctcatgtcaaacagatgtcatccctgtaaaactctctgaaacaaaaggagtttatgatatagcatctgtttttgcagtagatggctgagctaaaacagttttgtttcctttttacaaaatagccctaaatgcctccttttattttaattcattatgtttccatatcccctttaaaggagacattaaaacgtctgatatgattggaccataaatccctaatgaaaggatgaagtaaatactactcagtagcaccacctgcagttaatatcagtgttggaagatgtcttttttagcaccgtcctaaaaagcaaacatttcaaactgtccaaatgagttaacattaaaattcacaattttaataaaaagattaaagtgtcagctcaaaattaaaataaccacttcagactttacagtattaatgaatgtttactagattttatgttgcagcatcttttctttgtggctcatgctttttttttagggttacatgcatggatttttaaattgcctgccatgcctcttttcctccacctggctccatttgcttttttctctcagtactgtagcagttcaaatggctgcatacttatacctggatgggtactttattaactcaatattagatattttgaaatctggttgtcaggccaaagaaaaaatttttagctcacaaataaggtaataataattcatgctttgttaaaacttctttacctatttagtaaacttgttaaacaagaagagagatttgtgcctctgtgatcctcagtctctgccattcagatagcacagataccttagggcatgtttcagcttaacatttgcttggccaaaaggcatggcctgcctgtcttgagctagatactgtgttaggtgctgggagtacagtgaaaggcatcactgcccttcaggaatccaactcagtgaagaagacagaacgaggctgatgggtatgtcagcagataccgcaggagctcaaatagagccgcaagcaaagccctttcgtatggtgttactccatgaaacctaattaaattgttttttattggaaacctataatttgccaagcgctggggattcagtctaaacaaaacaagcagatccttatcctcagggaatagacagcttagtggcagggcagagattttacccagacatgcaggtaaagtacagactttgctaaaggaaaaatataggacttactaaactatgctgtgaggttctagcatttccaatttgtagatgagaaaactgagacttcaagaggcaaaataatttacccatgatcatactggtagaaagtggcagagcgaggactaagcccaagtttttgaactttaaatccaatattctttccattggaaacagttgcttgaagtagcacaggctctcattctgtgctatattaagtttttccatctgtcagttttattagttgtcattgatctgtaatatttctcacacaaaaccattatccaatatttcacacttcattttttagggtttttttaaaactgtatttggaacagtgccatttataatcaagtccaagtttttaacctaccaattaagagcaatacttagattataattatgattagtgtgtatattaacgttatagatttataccaggaaattaggacattttgttctgcttggcagtagttattagcaaaagaaaatttcaattttagaaaccgtaaatttaacttaaggattttctttgttgaaatttcagtgtgggttttcctttgtataataccacggattttacttttatgcggtgtatacaggtgttctacctaagctttcttcctgccaagagacacacagttcttcctgctctgcctttttcatgagcttccatgcttgctttgtttctgaatataaagcagagtgtgaatagcctgtggactgtatgctgacagacaagtacatgaagcgttgaatatcttcaagaaatcgttttatatgatcaagtcactcaactcgtgttgacataagcttaccccaacttgaattactcagccctgttgttgcagagtgagtttagtaacatggctacttttcgttggatccatgtctcctgcgtttcggagagctgcatattcatgtcagtcataacctttgtccctgtaacctgtcagttaactagaaagaattatacattgcatagcacttaaaaatttgcggccgcttttcctttcttgttgcgttggtagctgacgtttagtggtaaacaaagaaaatgcactgggtgaaaaggccttaggctttttttttgtagggtgagagtgggggagagatctcttgctctgttgcccaggctggtctccagctcctggcctccggcagtcctcccacctcagcctcccagagtactaggattatgggcatgagccaccacacctagccaggctttttatattgagttggttatatatgcttcatagccacactttataatattggagtatagtattaaattacagcttgttgtcaagtcagtgtttctgtaagacagtatatccaatattggttagagtaacacctatttggtgatacagatcaacagggtgtctctgattaatttagctcctacatagccagaagcaagttcattatgacttagaatattgtacatggttatgcaggaatcatcccaacctatctgtgtttataggtcagatgatgttcagtttatatctgctgatagtgtatatgcaggaaaacctataaaaccacttcagacttgttaaaacagtgagaaagccgtgattgaaatattaatacaactgtgtggtataaattttcatttacaatggaatgtaaatgctgtcatttgaatcttgtcaaagcctgctactaaaactctgaaataccttgtctagggaataagtcttcagtccagaaacaatatagatgtgatgtgtgtgattatacaagtacaacatatgttggtgtcagaaaccacaggcgaatccataactctgataagccgtacaggtaagtgttatgattctagaattttaatgtttgtattaaaatattttatattaaagaaataaaatgaaataaaaatgtatagcacttactgaaacacaggttaagaagtaagaaattttcactaattggttttatattttgttgttttatatatttacttatttattttttgagtcagtgtcttgctgtattgcccaggctggagtgcagtggtatgatcacagctcactgcagcctcgaactcctggcctcaagggatcctcccacatcagcctcccaaagtgctgggattgcaggcgtgagccactgcacctggctggtattatgtcttgtttgatttgttaagatgtgaactttaagcttgaatcttaggacagtaggcattttgtctagttgatacataggaaattgtctttatctgtcaattttatgttttcatttcatatgggtataaatttcatagcaattttcaatgccttagagttcatttcagtaatttggcagtaaggtactcagtattcagcaaaagatccttaaaacttaaaggcaataaaattttctatgaaagagtccatttttcaaaattaagctagtatgtgtagaataagtcatttaatttcattacttgatttttcccaaaagcaaattcagatatatatttcagaaaatataggcattctcagtgatagtgctaggcaatgcgcatgaactttcacccccttgtcaaaacttagcaggtttaactctctccccagattctgtagatatgatacaagtgagtgtgggaaagttattgtattaatctcaatgaaaacctgacagattgtgccataaaaggtcattgtttaatcccaaagtgtggtgatctgtgtatggtttcgaatatttaatatgtgcttaatttgcaaaccagcagacttacttataatcactcttcagaaagtacatctgtttgcagagtcttaaaactctgtggaaggtgtttgaccttgcctcagtcctcctcagtgtcttccttccttccttctttccttccttccttcttttcttccttccttcctttccttccttcctttccttcctttccttccttcctttcctttcttcctttccttcctttcctttccttcctttccttttcttccctccctccctctctccctccctccttccttcctttccttccttcgtttccttccttcctttcctttcttcctttcctttcttcctttccttccttcctttccttcctttcctttccctcccctccctccctccctccctccttccttccttccttccttcctttttttctttgacagagtctcgctctgtcatcacccaggctggagtgcagtggagtgatctcacctcacggcaacctccgcctcccgggttcaagtgattctcatgcctcagcctcccaagtagctgggaccacaggcatgtgccatgattagctaattagagacggggtttcgccaggtcttgaactcctggcctcaagtgtccgcccaccttggcctcccaaagtgctgggattacatggttacaccatgtccaatcagtctatttaataggtgggactgagtatatttacattcgtgatttatactgggaaatgtttaggagaatgtgatggaaacagggaacactagtttacctgataggaggagaaagctttgcctttatatttttggtatccttgaatttagacataccgtgccagattcatgtgatttaagtaagaagaaaataacatttctccgggtccagaattagattgttctttcattcatggagaaatatttattgagcaaatattatgcttcaggggccgtgctagattcttggactacagtcataacaaaacagacgtcatctttgctgtcatggaacttgtagacaaacaataagcaagtaaaccctcaaatacttaggaaaaaggttagcgattctagttctgttgaaggttttacatctgctttattagatcagtcttgcagcttaaagattcattttgatagctgtcagtgtctcagggatgttttcttgtgttcttaaaatattcacagattcataggattcattgcagttgtcctagggtcttcctaccaacgggcaacatcccgtgagcatcctctttgtgtaacatcagagaactctcagtctgttattttccaaatttattcacactccactttgtcactgggtttggtgtggttatgccttagatacagttttgtcatatctccctctttgtacttattatcagtttttcctcataagtcttattttctaatgtcatggctctccttttaactttctttaaatactcaccatcctttgccttcatgggatttctggtcgcagagcattacggattaacatgttctattccaggatgtttctaggactttctcctcgttgtcctatactgtgtgctttaagcggagctggtagcgtagcctttataatgtctgacttaattcaaggatcacaggagtttctctggctcatttcatgtctgcttcattcagtttcgttgcctggtgcacttatggtcagagtttgggcttggtttctcagagttcatgccatatcctatgcatttctgattccctacattttgttaagaaacatgctcacaggcagcagtaatgagttcttaaagagctacaaggccttgttgcacaacttctaaactttgcacaagggcacaaaagatttattgtttattttagtgtgcctattacataacaagttttctgtagtggtgaaacctgttcctttctcgtgcttttgctttttatgctgtcattccagtccttcaatgaccccatccttgtggtctgggcagtacggcttcatggatccctggttctgggggcagatagtcctgggattgaatctgagctctcccacttgtgagatttgtgatcttgcgcaaactgtttcacctctctgtgctgcttttgtcgttaatagaatgaggatattaaggttgtgagggtgaaataaaatacctaaggtaccagcacataataaacagccagtaagtggtagctggtagttactgggcccagcttttatcttctcaataattcattatctaaccaaagaaaagtactaaaaggctgatgacctctaaacactagggaaacaaagaagaattaattctgtgccagggtaggcaggcagagctcattttacaaaagagatgctgggcccaggcagagtgctgtccctgctgaggtccccatgctatgtctggctgctctggagtcactctagtatcttgggagcatcacaggcctggaccacacagtttctgtgccccactggggaccttgggaatgttatgccatactaagcctcttttcccatacgaaactcgggagaatacttccccgctcataaggctttgtgaagattaggtgagattatatttatgaagtacccagcatgttacttggtgcattgaaggggcttgttcccattttctgctcatgaagttgtcagattatctcagaagccctgttcttacccagaaaaaaagagagctgttttccattcctgtggaaggacagggaaagattaaaatgacatcattctatcccagtgcctaccaatgcagctattaataactttgttcttactctgtgtaaaccatacaccaattatagttatacctgacatttctttttttttcttttttaaattttatttttccataagttgttgaggtacaggtggtgtttggttacatgagtaagttcttcagtggtaatttgtgagaacctggtgcatccatcacccgagcagtatacacagcaccatatttgttgtcttttatccctcgccctcctcccactctttccccccaagtccccaaagccattttatcattcttatgcctttgcgtcctcatagcttagctcccacgtatcagtgagaacatacgatgtttggttttccattcctgagttacttcacttagaataatagtctctaatctcatccaggtcactgcaaatgctgttaattcattcctttttatggctgagtagtattcaatcatatatatatatctccgagttctttatccactcgttgattgatgggcatttgggttggttccacgattttgctattgtgaattgtgctgctataaacttgcgcgtgcaagcatctttttccaataatgacttcttttcctgggattgctggatcaaatggtagttctacttttagttctttaaggaatctctacactgttccatagtggctgtactagtttgcattcccaccaaccgtgtagaagtgttccttatcgccacatccacaccaacatctactgtttattgattctttgattatggccattcttacaggagtaaggtggtatcacactgtggttttgatttgcatttccctgatcattagtgatgttgcatttgatttgcatttccctgatcgttaatgattttttcatatgtttgttggccatttgcgtatcttcttttgagaattgtctatttatgtccttagcccactttttgatgggattgattgtttttttcctactgatttgtttgagttcattgtagattctggatattagtcctttgtcagatgtatagattgtgaagattttcacccactctgggttgtctgtgtactctgctgactgttccttttgctttgccaaagctctttaattagatacagctatttatctttgtttttattgcaattgcttttggggttttggtcatgaaatccttgcctacgccagtgtctagaagggtttttccaatgttatcttctagaatttttgtagtttcaggtcttaggtttaagtccttaatccatcttgagttgatttttgtataaggtgagagattatacctgacatttataacattggccccaaagttttactgaaaagttccactcaaaatttttcatattagatggtccttggtttagttcaatattgcactgctggacctgccctgatttacatctcccagtaccacttttgtagagaacaagatgggagaacaaaacattgtcctaagagtatcagtttctttttaaccataaggcatggaacccattttcccttagaaatacaactgtactgtgcttaggttctgaaactgtactgtggcagggggacagcatgatgtcaagggaagtacatgggctttgggctcaagtactccacacactgcccgggacatagtaggtgctcggtaaatgttgactgatagttgtccatatccctcagttcttcccatctataaaatgggtctgattctataagctttttgtgtaagtttaatttgtgcttgaaaataaatgtgtagtggtattattacgccttttcttccttaagtagaatagctgcccaaataatataagatgaattttttttaatacccagtccaaaaatacccattttcccctaattgtttcaaaacatacttttggaggtagctttttcatattgagaaccaaacaaggtccagccgctctattaagagagtatcttaagtctctctctccctccctccctctaaattttttaaatagattttataattgatgttaccatgcctcctgaaaattgcataaatcataaaggtacagctgatgaataatcacaaattaaactcatgcttgtaacacaaaccattatgagctcttcagcagcaccccttcgtgggccttccagtcattacccacccctcccctctgtctggtatccactatcttgacttctaacattatcaattagtgttttctgtttctgaacttaataaaaatggaatcatacagtacatattctactttatgttcagatttttttgctcaacgtgtgtgtatgtgtgtgtctgtatagttccacctagcagaattgcatttcattgttacatagtattccactgttaagaccaccgcaatttattcattgttctgtgaatagacatttgagttattgtaaggttttcctccctgatatgatctgataccattttaacattcttttacatgtttttgggcacatatatgaaatgagtccatttccattgggtttatacctaggggtggaatttcttggtaattggacatgtatatgtattcagctttggtagacagtgtcaacagttttccaaaatggttgtacctattcacatcctcaccagcactttgtgttgtcagtctttaatctttattgttttggtagatgtatagcagtgtattactgtgcttttgtttgcatttccctgataatttctgagtttgagcatcttttcatttgtttatgggctattattgcccacttcttttttgcattgtctattgtattagtttggcattgttataagggaatacctgaggctgggtaatttataaagaagaggtttatttggcttatggttctgcaggctgtcctctgcttctggtgagggtctcaggaggcttccagtcatgacagaggtgaagcgggagcagatatgtcacattgtgagacatggagcaagagagaggggaggaggtacaggctcttcttaacagtcagatcttgcagtaacagacagagaactcattattcatgaatggctacaccaagccattcgtaagggatccatccccatgacccagtcgcctctgcccaggctttacctccaacattggggatcaaatttcgacatgagatttgaaaggacaaatatccaaactgtatcatcggctgttttcttactgatttgcaggagctcttcatgtattctgagtacaaggcctttgtggggcgtattgcagatgtcatctaactgtggcttgcctttctactttcttaatgatgtcttttgatgaacagacatttccagtttaatatagtcaaatgtattaatctttttctttgtgtttaggacttttgtgttcttatattctgaaactagttttgattttttgaaatagtctgttgagtaaggtagacgatgatacagaaataaaaatgtgtgctgattttcagggatggcacatcaactatgcgtgcttaggtattactgagcctcatttactaatatggcactaaagctaaaaaaatctaaacagaaaacattccagaaaggctttcagcagggggaatgacagtttggaatggaaatgataaggttgtctctcagtgtagtcagttattgtatgggatttgtataaatagaagtatattagaaatgatgataatagctgatatttttgagaagattgtttgtgggccagacccggtgtgctaagcattcaatacgtgtcagttcagtcctcacagcagcccagtacttaggaatattactaccccaattttgtagacatggaaacagaggctgggctagcttaaataactttccccatgtctcagagccggggcctgaactcttgctcctaataactgtgtcatcctgcctgtctgtgctacaccagggagatctctttatgaagtgtactgctgctgcatgccagcagcccacaccaaatcagggtgtgaaacagaagcaatttcattatgctcagggattctgtgggtcggtcaggaatttggaaaggacgcagtagagatggcttgtcccatacagtctggggtctcatcagggaaggcttgaaggctggaagtgacccagacagctagggtgacagtcctctgaatgctgcctcagcataggctggtggctgtgctggctgttggttgggcatcagctggaacacatacatgatttctccttgtggactttgcaggtctgctagtccccaaaatgagcttcttagataagaagtaggcaaaagctctgttgccttttatgacctaaccttggcagtcacagcccatcacttccaccagagttacaggcttcagtcttttttcatctgtaggcatcgtgattctttagtcaatgtgttggcttagggaaaaacttaagtctttagaaagcttcaatttgtttaaggaaaatagtgaaggagatagttttatcaggaggaaaaaatatatattttgttttgaagagatgaactgaaagagtttgtttttctcagtggcataaagatctctcaggttcatcacaaaatttgaagtggctgttttgtgggggccttagttatttctttaaaagcatagaaaatgaattgaaggtcataagataagctctattgcaaaatttctattgaaatcgttgtttatgtgttcaaaccagactcaggtcaccccaaatcttgtaggacatccatctgcttttttccatctaagccctcaaggcagttgacctggaaactaaccttggtcccaggccaggaaagtggggggttttaaaccaacatccttatctccttggggttctgagaccgaagtaactgacttagtaacagttggagagtctgtagaaaaattcagtctcaggctttttagccaagttataagaagccttgggtttctacattggctttctttgggttgccaaagtagcttctttgcattgggaagaaatcattttttatacagatacaggttgggtgttattggttaacatagaaattgtgctgctttggacattccaaagcctggatctagcaatggccatatttacaggccactctaggagtccagcaatcacactgttagggtgttcacttctttccccatgtcatgtgtatgactttgccttggtagacttgaataattgagtcccaaatggctctgtcatcaggagcatccagcaattccaccaaggaagcaaagcagaatcgtgacaggtggtgtcatgatcagtgtgctcttttgtcatgtggtttcgttttggtttaagactttttttggccaatggatgggttgggataggaaggagcagtttaccctacgtggaaatatgattgttgctggtctgttggtgaggtggttagaaatgatttgttagacatagcctctgtttcaaaacatactttcttttttttttgttttgttttttaatacatgttattgtatatattggaggttaacaatatgatgtataagatgtagatagtaaaatggttactatagtgaagcaaatcagcatatctatcatcttacgtacttttttgtggcaaaagcagttaaaatctacttatttaacaaaaattcctaatacagcacattttgattacagtcctcatgctgtgtattaggtctctagacaagttcatcctatatacctgctgctttgtatgccggaatcttctctccctccccacccccagcccctggtaaccactccttccttctctgtgtgtgtgtgtattggatttttaagtaagattgaacaatatttgtctttctgtgtctggcttgttagcatgaggcctccagggccatccatgttgtggcaaaaggcaggctctccctttttaaggcggaatgattgagtatgtgtgtgtgcgtgcatacgtgtgtgcgcacgcgcgtgcacgtcacgttttctttatccgtttgtccgtcagtggacacttaggttgtttccataccttggtttttgtgaggaatgctgcactgaacatggaaaggcagatacctggtgaggtggcgatctcatctcctacacagaagagggatttctgggtcgtgtggtagttctgtttttaatttctttaggaacctccatactatttttcatggccgtaccaatctacattgtcaccaacagtgtagtaggatttccttttccctacacctttgccaacatttattctctcttttgtctttgataatagtcatcctaacaggttatcatttcctagtggttttaatttgtgtttccctgatgattagtgatgttgagcacgttttcatatcactgttgcagtttttatgtctttggagaaatatctgttcaggtcctttgcccattttttaatcgagttatttgtccttctgctattgagttataagtgttctttataaattttggatattaaccccttatcggatatgtggtttgcagatattttttttgcagtctttaggttactctttcattttgttgattgttttctttgctgtgcagaagttttttggtttgatgttgtcccatttatttatttgtgcttttgtagcctgagcttttggtatcataaccaaaaaatcattgccactgcagcgagatttttccttgtattctcttctaggaatttgatggtttctgatattccattcagctattttacccattttgagttgattgctgtggatgatgtaagatatgggtccagtttaatccttttgcatgtggatatccagtattcccagcaccatttattgaagagactgttctttctccattatgtcctcttggtgcccttgtcaaatattcattgactgtgtatttttagatttatttctgggccatttattctgttccatggatctgcacttctgtttttatgcccttaccatactgtcaaaacatattttctatcatttctcctttttctgggtactacatgtacagatcagagccttaaaaatggctgtgcccagccgggcgcggtggctcacgcttgtaatcccagcactttgggaggctgaggcgggtggatcacctgaggccgatagttcgagaccaggctgaccaacatggagaaatcctgtctctactaaaaatacaaaattagccaggtatggtagtgcattcctgtaatcccagctacttgggaggctgaggcaggagaatcacctgaacctgggagggggaggttgcagtcagccaagatcaattgcaccattgcactccagcctgggcaacaaaagcgaaactcccatctcaaaaaaaaaaaaaaaatgactgtgcccgtcagcccaggaacgttcttatctctggaaaggaaggggaggcaattgaggtgaggcacacagggagtctcaaaggtatattggtaatgttctgtgtctcaactaggagtgttaattgtttattattattattattattttttttttttttgagatggagtctcgctctgtcgcccaggctggagtgcagtggcgtgatttcggctcactgcaagctctgcctcccaggttcacgccattctcctgcctcagcctcccaagtagctgggattacaggcgcccgctaccatacctggctaattttttatatttttagtagagacggggtttcaccgtgttagccaggatggtctcaatctcctgacctcgtgaaccgcctgcctcggcctcacaaagtgctgggattacaggcatgagccaccacgcccagtccattctttattattcttaaggagtcttgcgggggaaatgaactctatcctaaaaaataatctgcagtgcatttatattgatgtgcaagataatttgttatagcattgtttataatgtcaaaaagatcaaaaacattctagctctatgctacttagtagagtgtattttcataggatggaacattataccccattgaaaatgcataatttttaacttgagaaaatactcatggaacattgtcaaaagtaggattaaaaatctatagtatgattctacttttgcttcagatctacatatgtacattaaaaaagaccaggaagctatgcaagtaattttttagaatttgtctttatacttgcctatattccatttttgtgcaaggaatatagattatataatcagaaaagggtttaaataaagagagagcgtttgctgaccagttgagtggacaggaattggctcagtaatttaaactaacaatccataagcaaggggctctgatagcatggcaaaccagatcacccacaacgctccacatgaagaaaaggcgtttttttcagctgtcagttctgcaggccgaaaagtttgagggcctggccctggcttctggtgaaggtttttgtgctatgtcacaacatggcagagaaggtcaaaaaaggggggacacatgcgaagaacggaagaactgaggggcgtcctggcttcataacaccccactctcaagagaactaactcattccaagaaccagtccagtcttggaagagcaggaactcacccaccaccgagagaaaaacaccaacatcccattcatgagggatccacccccaaacacagaaacctcccactaggccctgcctcccagtacagccacattgggaatcaaatttcaacgttagttttggtgttgacaaacagaccatatctaaactgtggtgctgtgtgtcttagtcccttcaggctgctataacaaagtgccttagactgggtaatttatgaacaacagaaatgtgttgcttacggttctggaggctgggaagtccaagctcaaggtgtcagcagctttggtgtctgatgagggcctgctccctgcttcataaataacacctttttgcagcatcctgacatgctggaaggggcaataaagctcccctaaacctcttttataagggcattaatcgtattcacaaggcctctgccctcatgacctagtcactttccaaagtccccacctcttaatattatccctttggggattaagtttccacataggaatttcggggggggcacatacattcagatcataccactcacattcacaaggtctctgccctcatgacctagtcaccttccaaaggccccacctcttaatactatccctttggaggttaagtttccacataggaatttcggtggggggtgggtcacgtaaattcagatcataccacactgtaatttaaaacttaggaactttgagaaataaaatgttttgtctctttgtaagagacttatcgagtggtttgaacagtgcttgccttctcattgtatcctttgcagtctagaatgagcatctttcctatgcctttggcaagtggtcagttgtcctttctaagtaattgtcatcatcatgaaatgtctccaagagttcctttaacacaaactttttggccgccataacttccttcaggaactacatacctcgtcattaaattcactttcactgagatcctctggctgcatatcccaagttttcttcagtggcagcagtgtcaacattcctgtggccaattatttatttgttctagaattcatttacatgtatgtctaattttgcttccagcattatcactttgtgggtttttgctgcacttcgattttgttggccagttcctctcttgtgactatccattttcgtaacacgtcctgcaggtttagcattgggagataaggatgcagcataactacatgttttgctgtcgggaagtgaactgcatagcacaatgaccagtcaccagctttgaaaggcttgcttagtcactgggcatgatgcatctctgtttacatagtagactgaagagctgccagtgaagtttgttctctgcagttactcacagttcgtattcccatagtagttaataactgaaatttgaaccatcctgtcgggggactgataatgtttaactaagccatagtaactgaaattcatgcagctcggaaccgtgcaaagcaaggaacacacacacacacacacactctctctctctttctctcactcattgttaggcttcttcttgtgtattttattttattccattgctgttataaatagttttttccttcttgctagcattttgctagcattttaatattgtttccatataagaaagttgttgatctggacggaatgttagttttgtggctttattgagttattatttgtaacagtttttaattttctattggattgttaaggtatatcattatattatctgcaaatcattttctcatactttcctttctatttatagcttttctttcttttttttttttttcttgagacagagtcttgtgctgtcacccaggctgaagtgcagtggtgcagtggtgttatcttagctcactgcaacctctgcctcccgggttcaagagattctcgtgcctcagcctcctgagtagctgggattacaggcacccgccaccacacatggctaatttttgtatttttggtagagacagggttttaccatgttggccagactggtcccaaactcatgacctcaggtgatccacccacctcagcctcccaaagtgctaggattacaggcatgagccaccacactcggcctatacctcttctttctttctcttgtctgattgtcctagctggtacctccacaacactgcatagcagtggggatagtaaatgtccttgttctgttcttgaacttaatggaaatgcttctggtgtttcctaattaagcttgatactagttttggagttgagaaagttatatttttatgatattgaagaattatccatctactttattttgtagagaagttttattaggaatgtatattgggttaggtgctattggtttaagtgcctcctgagtatggcagtaggaaatacacagctatacccatggagtatatttgtaaaaaaaaaaaaaattaaatatgaccttgaatctaatgaaacatgtagctcattggttcccaactaagggcttttgccccctcagaggacatttgccgatgtctggagacattactgcgtttgtcacaactgagggagaaagcactactggcatttagtgagtagaggctagggatgctgctggacaacctgcagtgccccagacagccgccacagtgaagaattatctagccccaaatgtcaggaatgcagaggccaagaaactcttctagatctcactcccagttcacaagaaacatgaaggacacagggacgtgataaacgacatcaccagaaagtcctcagtgtagtccatgctgtgagagattctgcaagacagatgggcctgatatcttcaacagatacatgcatgaggggtgacgggaaagaaagaagagatattatagattaaaagagacttaagagacttaccaaccaaatatgaaatgtagatctcatttggatcctaatttgaataagacatgtctgcaaaaatcaggcaactttaagttagaatacatgaaacaagattagcaaaatgccgacaatcagttaattgaaactggatggtacggattcatcacttttatttataattttccctttgtttaacgatttccataatcagaaatttaaaaatgaatattgatttttttagatttagtctcagcaacaccaatgaaaatatgcctttttgcttccaatcctttcaaatggtgactcataataatgaagctcctaatactgaactgtctgtattcctagaataagcctcccctaaaagaatgagcacatgctggtgcacaaattaaagtttataaactgtgttctcagaagctttaagtgcctaagatttttatacaaagatgattgtcaattgtcagaattatatattctgcataaaacaatagagaattaaatggaattccaccaattccatccaatgtgaaatgctaggcagcttattgtagtcattaaatactttattgtagaaagtttaaattataacagtagccttccataattccaattttataaaaatatatgtatttttaaatactgaaaaatagacctcaaaataataataatggttatatctagtgataacgctatgagtgatttttattttcttttttttcctatatatttctaattttctacagcgaatttttgaaatcaggaaaaaagttatttacaaaattaaagcagttcacctgtcacccaaatcttggtttctgatacctttctccaataaaagaactggagaaattatcagtctagtctaggactgtggtggggaatatgcaaagtgatcctggagcgtctcaggtccagcatgtaaggaagtgcttaagaaacaaaacttgaggtgtggcagcaggacacgggacccaaccacagaggcccagggggcaaggctggaggagtttgagcaacaaaataaatagtgcaatacagaatttgcaccaatgtagggaccagccccacatgatcggtgggtttttctccctgtgtgcagagacgagagattgtagaaataaagacacaagacaaagagataaaagaaaagacagctgggcctgcgggaccactactaccaagacgcggagaccggtagtggccccagatgccaggctgcgctgatatttattggatacaagacaaaggggcagggtaaggagtgttgagtcatctccaatgataggtaaggtcacatgggtcacgtgtccactggacagggggcccttccctgcctggcagcagaggcagagagagagagggagagagagagagacagcttacgccattatttctgcatatcagagacttttagtactttcactaattttgctactgttaactaaaaggcagagccaggtgtacaggatggaacatgaaagcagactaggagcgtggccactgaagcacagcatcacagggagatggttaggcctccagataactgcgggcgggcctgactcatgtcaggccctccacaagaggtggaggagtagagtcttctctaaactctcctggggaaagggagactctctttcccagtctgctaagtagcgagtgtttttccttgacactgacgctaccgctagaccatggtccgcttggcaatgggcatcttcccagatgctggcattaccgctagaccaaggagccctctggtggccctgtccaggcataacagaaggctcgcactcttgtcttctggtcacttctcactgtgtcccttccgctcctatctctatatggcctggtttttcctaggttatgattatagagcaaagattataatagtattggaataaagagtaattgctacaaactaatgattaatgatattcatatataatcatatctatgatctatatctagcattaactcttgttgttttatatattttattatactggaacagctcgtgccctcggtctcttgcctcggcacctaggtggcttgctgcccacatcccaaagtataaaataaccacgtgtccatactgatgtatataaatggttgaataggtgggtgagaatagacacaccccatgcaaaagaattccatgtaattgacgtagatacccctccctcaaggaggcagttgattatcccagctcttacgtgtgggctgcacccagtgacccccttcccagtggtacactttggaaaccgggttgagaaagaggaacttgaccctggagaaacctgacctcagccaggggaggaaggtcaggggtgagttctcctgagagtgggatgtggggaggatggcccttttcctttgtagcctttctcccaagaacccatcagctcagtctaaccatgaaaaaaaacagcagacagccccaacctgagggacattttacaaaatatctgacccatgttcctcagatctgtcaagggcattaaaaacaaggcaagttggccgggcttggtggctcagtgcgtgtaatcccagcactttgagagggtgaggcaggcgatcacctgaggtcaggagttagaaaccagcctggctaacatgacgaaaccccatctctactaaaaatgcaaaaattagccaggcgtggtggcacacacctgtaatcccagctactcgggaggctgaggcaggagaatcgcttgaacctgggaggcggaggttgcagttttccgagaccacaacgctgcactccagcctgggcgccagagtgaaactccgtctcaaagagacaaggcaagtaggagaaataattgcagtctagaagatcttaaggagacgtgaggactaaaagccatgttgtcctggatggggtcgtggaacagaaacaggatgttaagtacacaccagggaaatccgaataaagtgtggacttcagttaataatgatgtaaggaacattggctcctgatttatggcagatgtaccccaggaaggtaacatgttaacagtaagggaaataacttttctatatatctgtatctatacctgtaactattctaaaattagaagctttttttttttaaaaaaaaaagggaaaacagtaaacaatagctcatcactcttatttttaaaaggttggaataacattagagatgttctataggatcaatttgagatttctggagtttactttctgacccagttttctcaaaaatatgaaattcttgttgcataagtctgacttgtcactgggggatcattccagataaagaattttctggtgaggcctcgggaccacatctgaatgaaagtgaggaggcgagtgtctgaacagccagcatttcgtgtctgtttcccctctgcataacataaaaattaacgtatgatagcacaacatatgtaaagtcaccttggtagaggcactaggcggaagggagtgggcatctcttggctggcaatgagctgggtgcccagccatcatggtgcagggcagttgcccttctcaagcaactgatccagagacatttgagcaggggactgtgaccacactacagtacacaccacgaccgtgtgacagtcacagatacagacactgagtttaatggcttgggggtggagaagttgccagttgcccaccctctgataaagatgttagtgaaaatattatagatttattgaggtttgtcaaaaaattgctgcatctcagatataaatgggcaaaataaaatgaattaaggttagggtttttttgtagataaccaagaataaaatgtagtgattttgttttattatgccagctgtaataaagtcttaaggagaatgcaggctgtaaaagcttaaagagaataggggaacaatttttttaaatatttaatgaaatgtcaaacattttaccacattttgaagaaataaaacattgtagatatagctaaagcctcactttcttacttcttcaccccttcctcctgagaggtaacccattgtcttgacagtgatgtgtatcattgcaggtattcgtgaataacttttctatgtatataacatatgtatgtgtatatacatacatatggatgtattaagtaatacattctgttggttttggtgttttaacaatttatttaaattaaaagcttaacagatctgtttatttttcttttcactgatcattattggcattggtttctggtgctaagtgtagatctcatgggggttttttggttgttgtttttttttccactttgtaacattccactatatgaaaataaaccaatttgttttcatatgcttgtggaagaacagtcactgtgggttgtatccttttttggtgttcatggctaggatgattcttgtatgtgtttccttgtgaacaccagaattgtgggactacaggtgtgtgccacttcagccttaatagatattgccaaattgctcttcagagtgccatacataaaatttgtacatttccatttttccacatctgtgaaaaatcttaccagatttatcagattccacattttatcagactcacttatctttgccagtctgaggggtgtgatacatttccctgattgttagtgagattgaacatcttttcatatagttgaatttattagaagtcctatcaagaattgcctatttaggccgggtatggtagctcatgcctgtaatcctagcacttagggagtatgaggtaggaggatcacttgagtccaggaggccaaggctgcagtgagccatgattccaccactgcactcaagcctgggcaacagagcaagaccctgtctcaaaaaaaaaagaactaactgcctgtttattgcctgttaagtgggctggtatttcttagagacctttggccttggacctgattcctcagagtgtatgataaaagaatacagctgcatgctatcacaaagttaaattggaggtgggtgagaaaaagagtttagtctttgaccgtatttaattgttttatttactcctatgccgtttgattttctttgtgcctcgttattgctgactgtgtctcttattggtgtaggaaagagttcaggtaagtaagttatctggtttgttaggtttgtaattaagtatttaacaaaaatgtctttggaaaagtgcatttgcagtttcctaaaaagatgacagttttacaatacgacccagcaattatgctcctgagtgtttgcccaaatgatgacaacttttatccttataaaaacttgggctttccttataaaaacctgcgcttgctgggaagctgaggcaagaggattgcttgagcccgggagtttgagactgtagtgagctatggtcatgccactgtactccagcctgggcaacagagtaaggcccagactcaaaagcaaaacaaaacaactttgcacatgaatgttcctatcaccaattattcataattgcaaaaaactggaagcaaccaagatattgttcagcaggtgagtgaacaaacaaactatgatacatccacacaatgtaatattactcagcaataagaatgatcaagccctgaaagacatgtaaaaaccatacatgcatatcgctatgattccaattatgtgatcttctgggaaaggcaaaactatggagtcaacaaaaagatcagtggttgcccgggattcaggggcaggaaggaaggatgaaaaggtggagtacagggcatttttagggcagtgaaactattcatatgacgctggaatggtggattcatggcattatacctttgtcaaaacagaattggctgggcatggtggctcacacctgtaatctcagcactttgggaggcaggtggatcacttgaggccaggagttcaagaccagcctggacaacatagtgaaaccccatctctaccaaaaatatgaaaattaggcaggcgtggaagtgcatgcctgtaatcccagctactcaggaggctgaggcatgagaatcgcttgaacccaggaggcagaggttgcagtgagccaagatcacgacagagcaagactgcactccagcctgggagacagagcaagactctatctcaaacaacaacaacaacaacaacaacaaaaaaccccacagaattgtacaacacaaatagtggaccctaatgtaaactatggacttttgttaataaaaatttatcaatatagattcatcatttataacaaatacagcacactgatgttaataatgggaggaattgggtgcaggggaggaggggttataggaggactcagttctatctgaccagttttttctgtaaacctaaaggcatctaaaaaataaagtctattaatttttctaaaaatctttcattgttaaattcagattttaccaagtgtactcaagtatgtggaacaattatgttttctaatagaaactttttaagattatttgttttatttatgaaatctaaattgctgaagctttttcaagacgactgcttccattttttgtggatctataaagaatgcacagttcatgttgaaaatcatttcgttcctttttgctttctcaagtagtagagtggtacaaagtattaattgtgtaagtttttctttgtatgattaaataatttagagcaaatattttgcatattactacatcaaaaatctttccaaatattgtaataactaaagtaatctggaatgtttgtcttgattcttactaattctttataatataaaagaccttctttcattgattctaggacttccattctaggacctctctgaaatcagtgtacctcttagaatcagtaacatcttagattcagtgaaatacgatatgtctaataagggttcggaggaagggctataataattgttacagaatcatgataatttttcactgatgttatgggaccgttctgattttcccttgcctgcctgtcttccagatgctctctgtgtgggtatgtgtgtagccatcctccttctttgaagtctcatatgtggaaacatgcaagtgaccaaaattacaactacgaacaagtaaacaaggctattaacgacgcgatttcacaaagtggcaggtatttcatcctaccccctccctttattgctatatgtaaattaaagccaggattaaatctactagtcctacattgtagcctcctcacggtgtgctgtgtttgttttgtttttaagagttctggggaaatcccctggaaagactcaattaaagagcagtgaagagagtgcagatcccgtcactggaagttcagaaaatgcagtgtcatcttcagaactgatgtcccagactcccagtgaagttctgggtaccaacgagaatgagaaactgagccctacaagtaatacctcatatagtttagaaaaaatctccagtctggcccctcctagcatggagtactgcgttttactcttctgctgttgtatttgtggttttgaatcaaccagcaaagaaaacctcttggatcatatgaaagagcacgagggtgaaattgtaaacatcatcctgaataaggaccacaatacagctctaaacacaaattaggtggaataatgactcgagcaggaaagcagtagaagaggattccttcaccacagtttcacctttacgctgtcagacaacttcctgccacagaagaagtcgttgatgtgatttttgaggaaatgacagatgtgactttggaaccaaacttgtaataaaaggaattccaaatggacaagcagtaatgatatttaaatattttgagtgagggggagtgggtcaaagaggaagtagaggtgtaatcctgtattaaccctctgtcaccccttcttagtgtcgagtgtatttattaataaaagcttattagagtgtagaaatgccagcaagagttaagaaagggcttttcaggaactattctaaaagtcataaaagggtcacagtcttaagcagagcttagttttcttctcacttgtcaaatgcagactgtgaggcctccagtgagaaatgggaggcagttctgggagggggttttttcagtgtcaccaacagagtcaacaaggaaacataattagagggctttgaaatgatctactgaaatacctaaattgatagaaattaatcatactcaatctaggacatgttcctttactccttaaaaaagaaaggaaagatctctaaattcaaagctagattgtaaataggcattcaagaagtattgtcttaaatttacgatgaatttcttgtgagcagaggacgaaacaggtgaattctcaccagactcaaaccagatctcaattcgtagtaatgctaaatcgtcttccgtgttctcagaggttcttttcagtgtctgtcagaacttggcatactttctccatagtacgtagaccttctaatactctgctaaatgaaaccacacttgttatctgaaagtgtgtgaaagaaacaatgtatgaaaatttacatttgatcatccggcattggaaatagtttgaactatttccaaaaatcccttaggggatgaggggtgaaatttaaaagctcctgaaaatgagtactgctgtgttgagcttttctttcctggggtatattaatttagttatatttagcagaagaggaatataaccaaatgtgactaaaatatagcagaaattcaggttgtttgtaaaaattttaataacaaatagcatttggcaagtctataggattcttcctatctggaaattctattttgttagagtgcgataggacatatggaaaaccaacacaaagtgctttagcattaaaactcaccatcaaatagatgtaatcttattaattacacattttgtattttaattatttcaaggagtgaagaaaacagggtgtttttgtttttgtagttctgattactcatttatgcattgttttgtttaagtaaattctgcctacaagtgaaaaggtcggtgcgctcttctgtgcaccatcctcacggtgctatttccgaatatctgaatattgatttctaacacctggatgaggctgtgaccgatcaacttggaacactgtaaaggttttcgaatgggatacgctgtaggcacgttttaagaagtattctgttcctaaagtccaggtatgattggattaatatttataaaattattattaggaattatttaagtggggccaggcatcttgcaacattttctgatttttttttctttctttctaatctcattttggtgatatttaaacaaacataaatgattgtaactttgcagcttttttatttaggtagctttaatttatttatgaaagttaatccatttctgatacgtggtttttaaaaatatgaaatggatttatatatactatattcctcaaatccactgtatgtggacttatattcattttctccttttttcggaattgaaacattttaatttcaaattcaaatagaacatttaaaatgatttcattattattacccatactgttgccactcatattgtaagtcagttttttcattgctggtacaatgactcagtatttctttataaaaatctgttgttctgaaaatcaacaaccttagaaggattttgtcttagaaaatttccttggctttagttttatatcatatttagaaaataataatgaaaagcatccccaaaatttcaatgatgtgaatttttaaattacctttatttctttaaactaattccattgattgttacttaaattttccacctggaatcatggatttaaaatttccccacctcatggggaaaaaactaacccagaagttcaaagcctttaaagtttcatctgattctggccttagaattgtccttaaaagctttctcctggccgataggaggaagcatatatcaaggaggttctttcccttcccattatcattttgtggcaagccttaagttaacaatgtgtctaccaagaacaattgagttttctaaaagtaataatgaagattatgcaattctaactgtagaagagatagctattaaaataatcagtagcctgggcatagtggctcacacctgtaatcccaatactttagaaggccaaggctggaggactgcttgagtccagaagtttaagaccagcctgggcaacacggggagaccctgtctctacaagaaattaaaaattagccaggcatagttggcacgtgcctgtagcaccagctacttgggaggttaaggtgggaggatcacttgagcctgggagatagaggcttgcagtgagccgtgatggcaccattgcactccaaccggggtgacagatgaggtcctctgtttacctccccccccaaaaaaaaaattcagtaggaattccttcatagaataacatgttatttattggtattgacttcttattagacagagctcatagtatttgttttctgctccgaacacttaaaaaatactaagacgtgatagtgaaaatagctttgaaaagaaactacatatggcaaaggtggggaggggggaagatgatgcattctgatcattataaagaatacttttcagggctctatcattttctccctttctctaatcatccagaatatggcgggtgtcccagtgttcaacagtatcatgctaatattccatttgatcggtagtccaagttctttggccagatagtgcaatgttgtgacaccgaccgaagcctttgttctggatctttcttcctattgaaggtggctgctggtggcttcataattttctgttttttttctcacaaagtaaatggtgggcatccatgtttacattgcaccttcccgtgctgtaattggcttgacaaagacaagcaggcttctctgttgagacttattgtgtttttagttttcatagacacttatttaatctttttaaattgtacagcaaggtgctctaagtaatattcgataaaatatatttaatagaaatttgcgtttgatattcatgaacatgaatacatgtatttttttaagaaataagtattgtgtaacactatggcattgcttctatagccaaagtataaaaatttctggaatactgacatgtaaagactacagttaattctgacactgtatcttattaaaataggatgatttgcattttgtaaaattatcctgcacatcaagctgcatgccttaaagcggaaactctaggactgtgttcatgggagagcagttcatctgttcagaacagtgaggcaaggtctgtagtgcttctttaactacctttggaaatactgtacaatgttagaataatttattttgctttacaggagtttgtcatgtattgactttaatattgtattttggtaataaattttttgttaaaaaaaacttggctccaagttctattaaccacaggttgtgttcattcttttcctggaaatgatgactttattgcttagaaagttgtaaataattaaaagcttcccaagagttaaatgaaggttatgatgactcttgataacttgttaatctgttgctgactagcattagactgttacacgaagataaactgaataagcatttagctttttaaatcattttaaaaattaagtctaattttgaagcttttttccttgctacccagttcagtttctcttccaaatgtgacacgcttatatgctttcaattctgatatagtcaaagtgctaaagactagttctgctattgacgaaggaattagcattccttagtgaaggccaaaaactacagtgatatgttcacaccttgatcactctgtcgtctatacagacagctattgacatatttgttgcattgacgaagctaacatcatctgactgtatcgtgggtctggttatccatttgtgccctagaatcctgggtcacctcagttgaaagtgaccaaggccaaatatttcgtcccatgcttcccagggacaacataatcatatcccctgtctttgaaaaacccaatctgaaactgtgtcactaacctccaaattaaagaatccgagcatggaagctctagaacgtatggtccagtgtggcagccactataatatctaagtgtaaaatacatagcagttgcaaagacttagtacaaaaagaatggaaatgtattaacagttttttatattgattacatgttgaaatgatattttggtttaaataaaatattaaaattagttttacctgtttctttagctactaaacagttttaaattacatatgtggcttacattatatttcttttggacagcgctggtacagaagagagattagcaaactagggccctctcttcaaagccaacctgccacctgttttggcaaataaagttttattggcacacagccatgcttttgtgtgtgtacatatcatatatggctattttcaaggtacaacagcagcactgagtaattgtgacagagactctatggcccacaaaacctaatttaccacctatctgatagaaaaagtcttctgactagacctctgaactagaacaatggtataatttgtgctctagagctaccaggaagaaaacggctttttacaaagaaagctttttatagtagtgctttataactaaattagtttcttcctttgtaatttttatagtctacctgtctacagattttaaccatattttatgactttaacctattccatcgctgatatttaaagccagtttgaaataacaatgcataattaaataataaactaattcaaaatgcagctataaaaagtctcgcttgcctcctgacagctttacggtgttgatgttggcccccacggcttcaccctgtcagtggtgtgggactacagcacatggcctgcaaatgtaaccatggtgcaacgtaaccccagtgactaatccacttggctggggtgacagttgaattgaataatccaggatataaagaaaagagtcttaaatgcacctctttataatgaatagcatgtgcaactccaaagccagcttcaaaggtagggaggaggtggtagttggctttggtctagagctgttgattaaactggcagagctacgaaaaagtccatactcttatacatagatttcttccaagtcaatcagtgaatatgtaaaatgagaacatttttggccctgtaaattcatagagaagttactaattggtgccatacgatagactgacttaggtagtgtgttttggtgtgtatctcagaatccaaatcagcggagcatgaaatgctgaaaccatttccagagacctatgtgtacagcacaatccagtttgcatgctgtgctaggggactatagacctcatttttctagtggtacattaataaatatactgtatctagttttatttgaactgtttataagattatgacagctttggtttctttaatctcctgattttttttccaataatgggtaatcagtttaaagcgtttgccttaccaaagtagattatgtaggtaagaaggttttcttttgaattaaaaagtttaatgtcaggcatctaatataaattcttactggcatataacaaaatcgtatcacgtgttggtggctttttgctccctaactaactaaaccagatttacaccagttgtgttacttaatccagatagaaaaggtgtcattctgtaataatttgtaaaaatgcatataagacaggtacttctacaatggggtgtttgttttaaaaggattctacatattaggtaaatgtggaaaaaacatcttaaaacatctttaaaaaaaaaattgtcaccagacgcagtggctcacacctgtaatcccagcactttgggaggctgaggtgggcagatgacttgaggtcaagagttcaagaccagcctggccaacatggtgaaatcacatctctactaaaaatacaaaaattagccggttgtggtggcacacgcctgtagtcccagctacttgggaggctgagcctggaggattgcttgaacctgggaagcagtggttgcagtgagccaagatcacactactgcattccagcctgggcaacagagtgaaattccatctcaaaaaaaaaattttttttgcacaaatcagaaaatcatgaatccttagccatgagctcagacccaactagttcacctttctgatttctcagctttgtactttgttaaaaggaaaaacaaaaaagaatatttataattacccatgttactaccatggattcatcagtaataatcaagtatggttttaaaatgagaaagtatgttatcttaaatgtatacacaatggaaagctggacctgaatagaccctcaacaaaataaaacattcatttttcaggacttttattagcacctactagtgacgtttaaaggcttattgtcacaactgtgcacatctccaattttttttctacttgtcatctttagtatccatatttcagaaataatgtggctgtgttttactgaaataggcacatcaatccacatcttgttctttttgtttatatctgcagtcccatttaaattcagtatttccaaccacaaacggtgttagaaaattctatttccagcttatgagaaaaagtacagcaggatatggttcaaagcttaagctgtatttatttctgctcttccagagctagcattccacacaaaaaaagttatgctgaaataaacagtggtaggaaaccaatggtttcaaggctatctgcactttctaaaacccttctccatgtgaaacctgggaacacagttggtgcggctatgcctccctggaatgatgatactggagtccaccacagttccatcgcagaggtgaaaaactctaacatgaggctcttcagcatttgggcccacctggagcaaccctgtgctcagcctgcaaatgcagacaaaaacttcagtgtactaacagttgttttttaaagttccagggtacatgtgcagcatgtgcagacttgttacataggtaaacatgtgccatggtggtttgctgcacctatcaacccatcacctaggtattaagccctgcatgcattagctatttatcctgatgctctccctcctcccaccccaccccaccacaggccccagtgtgtgatgttcccctccctgtgtctatgtgtcctcactgatcagctcccacttataagtgagaacatgtggtgtatggttttctgttcctgcgctagtttgctgaggataatggcttccagcttcatccatgtccctgcaaaggacataatcttgttcctctttatgtctgtatcgtattccatggtgtatatgtaccacattttttcagtctatcactgatgggcatttggatttcatgtctttgctattgtgaatagttctgcaatgaacatacacatgcatgtatctttgtgatagaatgatttatattccgttgggtatatacccagtaatgggtactactgcatcaaatggtatttctggttctagatctttgaggaattgccgggcgtggtagcatgcacctctaatcccagctacttggaaggctgaggcaggagaatcatttgaacccgggaggcggaggttgcagtgagccaagcttgcgccactacactccagcctgggcaacaagagtgacactccatctcaaaaaataaaaagtaaataaaaataaaagtatacctgcaaaccagtccaaatgctagtcaggtgccatcttcaagtcaggtgctatcttcaagtcaggtgccatcctgcaggcccaaggcatagcttactagttctatcgagtggcctcgtgatcaggtaggaaaaccaaatcagcacttgtctttaaccataatccacgatgaaacttactcttgaaagataaagtggaacaaggcatggcgcagtggctcacacctgtaatcccagcactttgggaggccaaggcgggtggatcattttaggtcaggagtttcagaccagtctggctaacatggtgaaaccccatccctactaaaaatacaaaaattagccaggcatggtggtgggcacctgtaatcccagctactcgggaggctgaggcaggagaattgcttaaactcaggaggcagaggttgcagtcagccgagattgcaccgctgcactccaacctgggcaacagagtgcgtgagattctgtctcaacaaaaaagataaagtggaacaagagcttcatagccatattcctaactaggttataccttacaaaactaacaagaatacatatggacatgagatacaaagggcatgatcgctaattaaaaccctaaaacagtaacacctatctactgtaaacagacaagtcagctgcacctatacattgtattaaataccgtaagagtttttgaaattcaagaagacatcaggccaagtacagtggctcactgtaatcccagcattttgggaggcaaaggcaggaggatcgcttgaggcctggcgttccataccagcctgggcaacatggtgaaaccccatctctacaaaaataaaaattaaaaaattagcctggtgtagtcccagttactcgggaggctgaggtgggaggatcgtttgagcctgtagtgaactgtgattgcaccactacacaccaccctggttgatagagcaacatgaaagaaaagaaagagaaagagaaaaaaaaaaaggaaaggaaggagggaggaagggaggcagggaggaaagaagggggagggagaggaaggaaggaaggaagaaaggaaggcaggcaggcaggcagacgaggggaggggagggcaggggaggggaggggaagggaaagaaagaaggaaaaagaaagaagaaagaaaagaaaaagaaaaaagagagggaaagggagggagggaggaagaaaggaaaagaagagtgagaagaaagaaaaggaagaaagggaaggaaggaggaaggggaggaaggggagggaggaaggaaaggaaggaagggaaagggggagggagagagggagggaggaaggaaggaaggaagggagggactaatggtgtgcctgacgccatacacatcaaccttaaccttcaaaagaatgtacttttcacatgagtaatggcaggtactgccagttgttcctcaacatccattcttctatgatcacagaatttttagctgggcacaaagctgcccaggtaggctgtatttcccaggcttccttgtagctacatgaagccatgtgaccaagttatggttcatgggatatgagtagtgatacatgaaacttctgaagatatcacgccaggcacagtgtctcatgcctgtaatcgcagtactttgggaggccaaggagggagaatcacttgaggccaggagttcaagaccagcctgggcaacatggtgaaaccccatctctacagaaaaatacaaacattagccgggtgtggtgacacacgcctgtagtcctgttacagtaggcaaacagctagacatgagcaggagggggagcccctgagaaaaggaaggtctgggaagcctcatgcccaaggaccacccaaaatttgctaattattaacatctctaatggtggagggggtgggcaatgagtccagtgtgagcaaggaggagggtaaatacctatgcagaaaggagcaccccttaagactcctagtaatcacccactcttcagttaacctctcagaatgtcactagctgtgtgctgataaggagggaaagagggcaaagcagaaattcctaagagataccaggtgcaataaatatagatctgacctctatacaacctcctggggtggcggcaatgagcaatgcagccatttggtagagttcatacccaacaccggccacacatacccaccaactagtagtaagagagggtcccgtgagcctgggagggaatgcggcagggataaaggcagggacttaaggcagaagcagggaaactagacaaagaaaaaaggcagggacttaagacagaggtgggaacttccagaaaaaaatctgacatcattaaaacccaccgcagaattctcggggtggctgctggctcattctgtctccacagctggctctgcctcatctttcagagtattctgtctctctaaataaactctctgctctctattttccttcaatcaattctctcttttttggctaaactgcctcgtggccaaattccttctcccaaggaagactaagagctgaggactctgcccttccaggtaacacccccaactactcaggaggctgaggtgggaagattgcttgagcccagaaggtcaaggctacaatgagctgtaattgcaccactgcactccagcctgggcaacagagtgagatactatctctaaaaataaaaataaaaaatatttttctaaaaaagagattaaatgaatctaggatcacagagttcaaagttggctgagaaaatataccagttgtccttgaaacattcactgtatttgatggctatcttttctctaaacatattgtaatgcaaatataaaattgttttgttttataaaacaatagaatacatcagctgaagttacccccaaaagaaatgaaagaaacttctgggtgtgccctcaaaattaaggggagttccacctccccttctttctctgttctgccacctgttatgtaaatgttatgatcactgactatgagaacaagcacaggacagaactcctaaaactcaacaacaaaacccaattcaaaaacgggcaaaggacttgactagacatttctctaaagaagatctacagatggccaacaagtacatggaaagatgctcaacatcactaatcattaaggaaatggaaatcaaaactgcaatgagataccacctcatacccattagggtgactactatcaaaacataaaaaagcagaaaataataaagtgttggtaaagatgtggagacactggtacccttgtgcaccattggtgagaatgtaaaatggtacaatcactgtggaaacagtatggtggtctaatgggcacagagtttcagtcttagaagatgaagagttttggaggtatatgctggtgatggttgcacaacattatgaatgtaataccactgaactggacatttataaatagttaagatcaggcaggcgcagtggcaatcccatcactttgggaggccaaggcgggcagatcacttgaggtcaggagtttgagaccagcctggccaacatggtgaaaccccatcactactaaaaatacaaaaattagccagatgtggtggcgggcgcctgtaatctcagacacttgggaggctgaggcacaagaatcgcttgaacccaggagatggaggcttcagtgagccgagatcacagcctgggcaacagagcaagaccttgtctcaaaaaaaaaaaaaaaaaaggttaagaaggtaaattttatgtttttttgccacaaaagaaaaattttttaaaaaacaactgtgacatttttgttggaaggaccctgggtccctgacattgtggaaccagactgcttacatgacagaaataaacatcatttcagccactgtcttttgggtcagtactgaaccctcagctcttatttccagtctgccccaccatttacatatagagaaatacattaaagggaaaagtaaaccaccaggattctgcaaggatccaaccaccaaaccctagtctacatcggtgtttccacctttatttcattaccatcctcctaagcccttcaaggcatttttcccaattaatttccccacccatgacacagaagtactgtattgtttatctttctaggtactgtaagtgtatctatgctttttccttttttctttattttgggacggagtcttgctctgtcacccaggctggagtgcagtggcgtgacattggctcaccacaacctccgcctccaggtttaagcaactctcttgcctcagcctcctgagtagctgcatctacaggcacgtgccaccacacctggataatttttgcatttttagtagagacggggttttgccatgttgaccagggtggtctctaactcctgaccacaggtgatctgcccacctcggcctcccaaaatgctggattacaggcatgagacacagcgccaagtctgtacatctatgctttatacataaaaatagtaatttttttcaacccccagggaccagttttttcccactggggggtcatattgccatagggaattcacccttgtatttaaatgaactggtttaatgaagatagttacaggaaaagctatttatttcaaacctcatttcctggtatcttgactgaacatccaaaagggtcaagagattgtgatgagaaacctgtgagaggaggctggatttgttacctctatcacgtggagaatcactaaagtacaacaaaatcaactcagtacagctagactccatctagctgttgggatagtttccatctcagagcttttggacctggacagttgcaatcaaacctgtggactttatgcataaggagtcctttgggttagctcatctctgtccaccagttgactcaggaaggtttgtggggagcacttgataagtgttagtgaaaatccagccctgcactagattagccataatttaaggcatgataaaatgtctgaattcgagagtgttagaaacacatccttttctggctgaaagtcctgcttacaacagggaaaaaaaaaaaaaaaaaaaagtcccaggcctgacaatatgccttggcatctattagtgggaaaaatctgctgctgagatttgtggacacatgtgtacatgcctgttttgcaggaaatgacattacagcagtccaaggaaacaaaccagaaggaccagccaaggacactgattctcggactaacatctagagaatcagcacatgtggcaaaagcttatgcaataaaacatcatcatctgctttaactgaataccttacctattcgtgtcctcattcaaaaatacacaacagttattctaaccatggaaatggaaaaaagtgtaggtggtaaccatggaaatgaagaaagtacagacaagtagaggtaagcagagaagcaggtgttaaagaagaaaatgaggccagacacagtgactcacccctgtgataccagcgctgggggatgccaaggcaggaggattgcttgaggccagaagtttgagaccaacctgggcgacatactgaaaccccacctctactaaaaattaaccgggtgcaggggctcacacctgtaatatcaacaatttgggaggccaaagtacgtggatcacctgtggtcaggagtttgagactagactgaccaacatggtgaaaccctgtctctaataaaaacacagaaaagttagtgaggcgtggtggtgcatgcctgtaatcccagctacttgggaggctgaggcaggagaatcacttgaactcaggagatggaggttgcagtgagctgagatcgcatcattgcactcggtctgatgacaagagtgcaatggatgacaagagagaaactctgtctcaaaaatagtaacaataataatttaaaagaaaatgaaacaaaaattccatatgtaaatactttgtgaactttacattttatagaatccttggatttgtgcacctacgctaatctgtctaaaaatttcactattttaaagcactacaaatctagttaatataaagttgaacaaaggaagagaaaaaacacaaacaatatttcataatgctttttctgaatgttcccggaccaaatcgagggtcaggctgcttattctcacagcccaataatgagacgcagatgaactgggaaaggagggagtttatttctgtaactggatacagggagaaggcctagaaattatccccagaccaactcaaaatcacagtgttccagagcttatataccttctaagctatatgtctgtgtgtaagtgtgcattcatctacagacataagtggtcgactttttctgatctctaactaagatctgagtcctgaagaccttcccctggagcctcagtaaatttatttaatctaaatgggtccaggtgctggggtgattacccttatcttgtttcctgctaaatcatggtttggggagttccttcagaccccaataaacttgcctgtggaggcctggggagtttcttcagacccccaataaaacctgtataatcccaaacgggtcctgtggaaaattcctcattatcttgtcatgcttcaaggcccaggaaaggccagggcagaactcttggtgggcttttgttacattccagcatttgtatagggcactggctctatcagcttttaatatttaacttcgccactcagtcagtactgaaacggttgtcatggaggcctgcattagtgagacctggcctgccacatgaagactcacagaggagaagccatctattgacaaacattttaaaggagggaaagaggaatccaatgtgatgtcagtgactgtgggactctggaatgatgcgagcatagaggaagctcatccctgacacttggcctgggttccctaagacccacgcatgccaagccaatctcagaggactgccatagacaggccccacctctgtggtctctgacatgagtcatacacagtgtgtgtaaaacaatccaatggaatgtatgcagaaaacactaggatttccacgtgtagtcactttgcttaaaaatatgtttatatgggctgggtgtggtgcctcatgcctgtaatcccaacattttggtaggccaaggctggaggatcacttgagctcaaaagttcaagactagcctaggcaacatggtgagaccttgcctcatttaaaaaaaaaaatgtttatatgtatacagaaagagaagacaaaatttttttctgataaaagtttggaggctgggcgcactggctcacgtctgtaatcccagcactttggggagaccaaggcaggcagatcacttgaagctaggagctcaagaccagcctggccaacatggtgaagccccatctctactggaagtacaaaaattagtcaggtgtggtggtacacgcctgtagtcccagctactcaggaggctgaggcatgagaatcgctagaacccaggaggtcaaggctgcagagagccaagatcgcgccactgcactccagtttgggaaacagagtgaaatcctgtctcaataaataaataaataaataaataaataaataaataaataaataaaagaagtttggcgaccattgcattgacttttaccaagatacttgaaaagtcaactaaattggatgaaagtactgttggaaaaaaatatatgtagtataccaaactgccccatacatgtttctgtaagggaatactcagcattgtaaatatctcatttctcccaaacatttctaaacactttatataattctagtaaaaatttccatggattctgttttagaacttagtaaatgattataaagtttatctgagcaaataaatatgcagaaattgccaaaatatgtggttaaaagaagtgtaatgaagggtcaattgccctctcaatatgaaaacattctataaaataattaaaaacatgtagaactgtttcaagactaattactttttaaaatcatttaaacataagtgtcatcttataatacaaaaattagccaggcgtggtggctatagtcccacctatagtcccagctacttgggaggcggaggtgggagaactgcttgagctcaggaagtggaagttgcagtgagccgagatcatgccactgcactccagcctgggccacagggcaagaccctgtctccagaaaaaaaaaaaaaaaaaaagagtgagcttataaataagccatatacatatgggaattcagtatgtggtacaggtaatttaaatcagtagagtaaggatgatggtgaaataatcaactatctaatttaaaaaaaaattgtcaagtctctcccacaccatattaaaaagttataatatttttaaatactagcagaaagaattaaaaaacatttacaatcttgagatggggaaggtttttctaagcatgatggaaaaacccagaaggtataaaagaaatttgacaatataaaaatggaaaatccctgcatagcaaaagacatcataccagatacacaataatgagaaactatctgcagcatatatgacaacagattaataaatacccataatcggccaggcgcagtggctcacacctgtaatcccagcactttgggaggccgaggtgggcagattccttgagctcaggggttcaagactagcctgggcaacatggcaaaaccccatctctacaaaaaattgttttaaattagccaggcacacacctgtggtcccagctactcaggaggttgagatgggaggatttcgtgagctcagaaggttgaatctgcagtcagctgagatggcgccactgcactccagtctgggcaacagagcaagaccctgtctcgaaaacaaaaacaaaaaaaactcataatctataaataatcccgtcacagcaagattaaatagatggtgaaagaacacaaaaagacaaattatacaaaagaaatgcaaatagccaataaactcctgatatattgtcttcacctcattaataaagaatgcacactaatcatgtattatttgtcacctaagattggcaaagatttaaaaactaattgttggcaatggcatggagaaataagtgtcataatacccactggtggaagagaaaaacaatagaatctttaacctttttggaatgtagtttaccaatgtttatcacaatttagaatatgagttctagggctgggcatggtggctcacaactgtaatcccagcactttgggaggccgaggcgggtggatcacttgaggtcaggagttcaagaccagcctagccaacatggtgaaatcccatctctactaaaaagacaaaaattagcccggcatgatggcgggtgcctgtaatccaagcttctcaggaggctgaggcaggagaatcgcttgaacctgggaggcagaggttgcagtgagacaagattgcgccactgcactctagcttgggcgacagagtgagactctgtctcaaaaaaaaaaaaaagaatatgaattccaacaaccctgtttccagaaatacatcctaaagagttacataaatataagtatgttcttacagcattccctgaaatagcataaaactagaaacaacctagatgtccaactagatgggaataaataaatcgtaacacatacatacggtggatattgtattggttatctatcattgtacaaaattacccccaaaacttagtggcttaaaaaaacaatgtacatttattatcctcatagtctctgtgtgtcaaatacttgggagtggcatagatgggcacttctggcccaagatctcttatgccgccatctgaaggctgacctgtagctggccgatctattaggttggtgcaaaagtaatcttggtttttgccattacttttaatgtcccaccaacctaatacttccaagatggctcactcccatggctgccaaggtggtgcaggctgttgcctacgtggccttctctacaggcagtttgagtgtcctcactacatggtggctggcatccccgctaagtgagcaatccaagagaggctaaggctgaaactgggatgtcttttatgacttagcctcagaagtcccacactgtcacttccacggtattctgttgttcacaaagaaaaaccatgattctgtggaaccggatactgtatgaggataaacatgaggcagcacagatcgtgtaagctgaggtctaaaggctgaagagtacctagtcaattaaagagggtttaagactttttataagccacgtgacaaacctctgacagaggtttatgtgaatagaaagtgaaggagaggttgaagagggaaacagagcctgattcgtggcagtccttacaagctgtgtcatggagcttaatttttataataaagccaaaacgcctccaagggatttatattttagtaagatcactatggttattacatacaggtaaatggactacggtggtggcaacagagatgagcaaagtgaacaagatctgaggtatttacgagataaatgccaacaggactcaatggatgattggatgtgtggattacacaatagagaggaatcaaggatggcttctaggctcttgatttgagcaataaggtaaatggagcacacagaaggaaccgcaagtgtggggattagaaaaaggtttaacatgttgagtttgaggtgtttacacacatggaaatgtccaataggcagtggacatatggcacctggagaccaggagatacacctggacataaaaacaggagttatcagagtatcagtggaaatcagatccacgggccacagaatcattgatttttaagaggaagaggaggccaggcatggtggctcatgcctgtaatcccaacaatttggaaggctgaggcaagaggatcgctgcagcccaggagtttgagaccagcctgggcaacagagagaccccctgccacccccaatctttacaaaaaaatttttaaaaaattagtcaggcatggtggtgcatgcctgtaacctagctattctggaagatgagatgggaggattgcttgagcctttgagagcaaggctgcactgagccatgattcagccactgcactctaggctggatgacacagtaagtcctctttccaaaaagggagaagggaggagaagaagaaagaagagaggaggaggaggaagaacaggaggaagaggaagaagaaggaagaggaagaaagaagaaaagaagaaagaagagaaagagaagggaggagggaggaggagtagctgcatgaaacttaaaaggaatgcctgaaaggtagacagaggaaacacgcacagtctgttgtcacagaaggcaggaatgatggagagtgtttatactaagtcaaacaattgaaaaatgaacactgggctgggcgcagtggaggacacctgtaatcccagcactttgggaggccaaggcaggtggatgacttgagatcagaagtttgagaccagcctggccaacatggtgaagctctgtctctactaaacatacaaaaattaaccgggcgtggtggccagcacgtgatgccagctactcaggaggctgagacaggagaatcgtttcaatccgggagacggaggttgcagtgagccgaaatcaccccactgcacaccagcctgggtgacaaagttagactctacctcaaaaagttaaaataaataaaatttttaaaatggacatcatgtatcagacaggaaaaagccagtaagacggaagaactcacaccctcgggatcccaagacaagatacttccatgggatggatgtaatgaacagtgttaaaagatttctggtgcagtgcttctcaaagtgtgatgtacacataaatgacctgggggtcatattaaaatgcagattttggctacacaggtcttgggtaggacctgagacctggcttttctcagaagaccccaggtgatgcccatgctgcacagcccacagaccacatgttgagtaacaaggttctgctgtggttcccaaacttttccgagcacagaattatctggaaaacttctgtactagtccatacagctatacatactgctataaaggatactgctacaaagaatgcccaagactgggtaatttataaaggaaagaagtttaattgactcacagttcagcatggctggggaagcctcagaaaacttacaaacatggcagaaggcaaagggggaagcaaggcactttcctcacaaggaggcaggaagaagtgctgagcgaagaggcaagatccccttataaaaccatcacatcttgtgagaactcactatcatgagaacagcatgggggaagctgcctccataattcaattacctccacctggtctctcccttgaaaggtggggattatgggaattacaattcaagatgagatttgggtgtggacataaagcctaaccatatcaacttcttaaagattagtggtcccctagccctacagattctaaattgagtaggcgtggggtagggcctgataacatgcatttcttaacaacctcccaagtgatggtgacagtgacgctgcagatccccagaccacacttttgagatgcacagcacaactatttgtggccctggcagagacaaccagggagactatttaggcttctaaacctactgcaaaccggaagtcttgctatataccaccactgcagtcacagtccattacaggagcccattccttttatagtacctccctggctccgggctcatatggccagaagtgtgagcaaggacctacactcattatccatcacctccatggttactttatcagaaccaaagactcattcttaattggcttattctccccaagacttactctcagcagtaggtcctacttaggaaaagtctcaaagcttcatcttgcttaggaatgtcttttcatagtattaaaaaaagcagctactgctgaattctactttctttttaactaagcgatgatatttcacaatggtcacatttcccccagagtgaaacaacttgagagaaaaaaaaaaacctataaaataagagggaaatcctatttaaggggaactcaattcacctatgtattcatgaaacagacacatgcacataaaggcatcttaacgtgaaaaataaacatacagtccttgccctcaagccaggcgacagaaaagctaccaacaaccaggctgaaacaagacaaatgccatctgaaaaaacagctgacatttgtttctatcaaagccatccagcagatacctcaacatctttccacagaacgtgtgctctttactaacaaccgacacacaaaggaggacgatctccaacagaggtgactaggaaaggcttcctggatggcgtaatttagtgttggagtcagaccaatgagccgccttttcacgggtggaggtcccagatggccatccctttaacaaaaatcaattaacatgtaaattatgtactgacaaatacaacgtttgatgggcccgctgcagtggctaaagcctgtaatcccaacattttgagaagctgaggcaggaggcctgcttgaactcaggagttttagaccagactggtcaacacaacgagaccccatcactataaaaattaaaatgaatctcagctactcaggaggctgaggaagcagggtcacttgggcacaggggactaaggttgcagtgagctacgatcacaccactgcactccagcctggacgacaaagcaagacccccatctctacgaaaaatttaaaaattagctgggcatagtagtgcgagcctgtggtcccagctactccggaggctgaggcgggaggatcgcttgcgcccaggaggccgaggttgcagtgagccgtgatagcaccactgcactccagcctgggcgacagactgagagcctcacctgtaaaaaataattttaaaaaaggttccacctagtgttttccgtggtgtgactaagaaaagtatctagaaataaagcacagtcagtacctgctctcaaaaaacggctgccaatctagtttggagacagaaaaatatacccgactgagaacacagaggagcctgttttcggaagaggggcgtctttggagacgcaaaatcctctccgcgggacgctgacgggcagtcggtaaaggacttccaagcactggtcagtgacaatcgggcgctggggctttgccaaggcccggaggcggcgcgccaaaccgggcaatgcgggaagcggggcaggcccgagtggccctactgctgccgtccctactgatccctgcgcatccgccacagagcagggaacggcagaaaggaggaaggagggggagttccgtaaatcaggccctcaggggctcccaggcccgcacccctctcaagccccggggaccaccgcggagccgctgctccgggccgtgcggctcgaggcgaacctgcctcagagccgccgggccctcctatcccgagccgtatctctagctccggcctgaggtggccggcgactgcgtgcgcaaacacaagatccgcaccccactccccgccactgcagctccgcggccgcgctcagagtctccggaacagaccggactcaatgcggaccaggcaagcggaagtgtgccgcttccttccggccagcgcagcacgagacgaggcggggaaccgcgggaggaggcggggcctagtgttgacgaacagctcccggggcctatgggcgcgggggcagccgcccggcctctccggcgcgccccctccccggggctgttgacgccccccagcccctcatttccacaaagctccgcggcggttctgccctccttgtacccgcggcgcgctgcggcccgtggcgcggccccgttcccgcctagccccgtcggcctccttcccctcccggagccgcgcgtgaggacggctgaggccgcaggtctgtggcggcgcgccgggacgcgcgggcgagggtctaccgagagggcgggcgggcgccggcggaaccctcggctacagccccgagcccctggggccgcccctccccgccgcgtggcgcagtcggggggcgcggccgcggcgtcggggcgtcgggaggggcggagcgcgggagtgtctgccgggacgcgggccgggctgggctccggaaggaccaagtttgcggagcggcttctgctcgtcggccgtgcggcgaggcagggcctgggctgcgaccccggcggccgctcgcggtcttgggagagctggggcgcgtgcctgaacttcccggctgcccctgtccttggagacctacctgatggggacgccaggtgtgcaggggcgtggcgcgtaggtaagcggacccggtgcctgcctcgtccaggggatgctcactagagcgctaggcttttttatttttattttttagagacaggggtctcgctgtctcgcccaggctggagtgcagtggcgttatcacggctcactgcaacctcgaactcttgggctcaagcgattctcccacctcagcctctggagtagctgggaccacaggcatgcaccaccgagcctggctattttattgtatagatagggtctcgctctgttccccaggctggtctcaaactcatggtctgaagtcatcctcctgcctcaacctcccaaagcgctgggattacatgagccgcctcgcccggctagcgctagtcgtccttattaataaagaatcgcttctggtcccttttcagttgtttacaatggcattccttttgatctgatggaggaactttttttcttagttcatgggactgttgcagtgcctgacacataattggtacttaaatatgtgttggttttctgccttaacatattagaatatatgaattgtttaaaaaagtcctctcacacttagggaggactctaggatgaggtcacatgggggataagcccatctgtggctgtaggactttgttaaacactcctcttctccctctctgttccagattctccatttccagtgcttgaaagcacagtacttaaatctggcttcctgcttttttttttttttttggtatgaatgaatacatgaattgtataatgttagttggtttgttctgtagagcaagttacccttaggaattaataaactgtggaaacaatcatgtcaggctactagtcacatttaagaaataattagtaagaggctgttcattattcagaggagtgaagcaagatgttctggaggactggaacccgcttactcactgccaccactcccccgcctcccacttgctgctgccaaaccaggctcctgctcccccccacccattactcccaccgacgctccctgggatagcagctgccctgattggcacacccccgcagtcatcaccactgaggcgtattcctgaagctgccagtgtgaattgttttatagaacactggtgttaaaattcaggtacctgagacaaaacaatattttaattcttcaaaatccggttgtcaacacatttactatggagtatctcccacgtggccacttctgtgggaggtactgaagacctactaccgcctatggaagtagaaaataatatacaactgtgtagttacgtgacgcattgcgtggtaactgctatggctcagggagggagaagatcagccggaactggaatgtcccaagatgttctggaagaaaagcagtggctcgtttgtgttgcttacctgtattcctgactcctggcagggcctgctgtagagcacatgcttcatgaataaatatgattgagttgaataaatatttgaattgtgttttgagtgtagctttgaaggccagcaacgatttagatggcaagatcgagggcaggctgggcacaatggctcattcatgtaatcctagcactttgggagtccaaggcggggaggatcgcatgaggccaggagttcagtaccagcctgggcaagatagggagaccccatctttacaaaaaataattagccaggtgtagtagcacatgcctgtagtccagatactcgggaggctgaggtggatcacctgagcctgtggaagtagaggctacagtgagccgtgatggtgccgctgcactccagcctgagtgacagtgagaccctgtcttggggggaagaaaaaaaaagggagggcatgctaatagagggaaaatggcataagtaaaggcatttcagcatggatgagcacggggtgtgttggggagaaggcactgacgttgatggcctgtttattgctatctaggagtgatttggagaacaatgcatgtaagtctgacatcatgatgtccatccggcaaagaagagaaataagagccacagaagtttctgaagactttccagcccaagaagaaaatgtgaagttggaaaataaattgccatctggtaggtgatttaaactaaagcagcaatttgggttgcttttatttctgcatattaaaatgtcactctccaataggataaaaatttggtgggacctaacaattgaaacttgttgtagtaccctgatattctaattgcaatttgattagattgattttacagttatgatttgacaaaagatgaaagagctttgattagaagtgtttgtcagctgtctgttcattaacttacggttcttccaatctcatcctttgactctctagagtaatggtccccccacccacaccccagattttagtctctctctaatttttctggtcgtgtatactatttacaccaggcaaccttaccttgggtgagtttccattaaggtagtgaaaggtggatcaacattttttaaaaattctttataattagtcaaattcctgaagttttcttttgcttttttttttttttcttttattggtgggaaaagtaatcagaacttggtcagttgtttgtataatggtaaagacttgctaagtgatgcatcagatagcattaattaccaacttcttgcttcctgagtagcttttgtaactaaagcatggtcaggattttaaaagttaacatgaaaatcttcatacccattaaccattttggatatctgacagaatttacattatttacagccatgttaattcttaccagccaggctagtaaagcaattcagggaaacagtttaacaaaagtaatctgtaatgggaggtcatgacacctggctcagccattagcgagtgattaacacgttttggataatagtactttctgaacaccttaaacaatgcaaagaaaaagaaatatactcccatcctgaaactaacaccagtggcactgtcttgctgtcttaatgtcatattctgcacatgtatacccataagcattcgtatacagttttgcaaaattgggatccacgtgctgttttgtagcttgctatttttctcttattatgttatgaacatgtcataagccagttaacgtatttttgaaatatcatctatgtaaagtatttttatagctgccactgtagaagtgaaaggttttcttaccatttgctaatacagacagaactgtgatcaatttccttgtggccatatgtttgtttaaaactttatttccttggggcatgtcttagtccatttctgttgctataaaggaatacttgaggctaggtgatttataaagaaaagaggtttctttgcctcagggttctgcagactgtatgagaagcatggcaccagcatctgcctctagtgagacctcaggaagcttccagtcgtggcagaagacttaggggagccagtgtgtagagatcacatgaccagagtagaagcaatttccagggaacacaggatgtcaggctcttttttaaccaaccagctcccctaggactaacagaatgaaaactcagtactgctagaatctcaccaacctgtttataagggctctggttccatcaccacaccacctcccattaggccccacctccaacattgggaatcacatttcatcatgagatttggaggggccgaatagtcaaaccacagcagggtacatgcctagattgggaattactggccaaatgggatgctcattttggtggcttttactcactgctgccatgttgcattccagagaggcaccaatttattcttctagcagcaatgtttgaagatgtctattttttatacccttaccaaaacagtattagcattttgaaagctgtcaaattggccaagatttaagtataactcacagttttgatttgcatttctttaacattaatgaatttaaacatcttcagtctgttattattattggccacttttttctattgtacattgcctgttcatgtccttaatctttttcctactgcagtattcatcttgacaggacaataaattgtcctgaaataaaataaattgtcctgaaagtattcatcttatgttaagggtatttaagctttcttatatgtgctatccatattttgcctagtttatatgtcctttaacttgagttatgttggattatttattctgtgggtttttccccccagagcattcctgcaaaacctgtgggtttaaaaaaaaagttttaggtaatcggccaggtgcagtggctcatgcccgtaatcccagcactttaggatcccagcttgggtgggtgaatcacttgaggtcaggagttcaagaccagcctggccaacatggtgaaaccctgtatctactaaaaatacaaaaattagccaggcatggtggcatgtgcctgtagtcccagctactcaggaggctgaggtgggagaattgcttgaacctaggaggcagaggttgcagtgaaccgagattgcactactgcattccatcttgggcaacagaacaagatcctgtctcaaaaaacaataattattttttaggtaatcaagtttttaaaatagcttttaaagaataagccaccaattgtacctagattatctaaaagatcgattacgtcctagacacgtaacacatttagtcatccatttaacagacttcatagttaaattacggttgttaaactgtgccggacagaggccctcagtattaaacatgaataagataatgtatttgtcttcaagaagctcacgttgtagttggcagaatggacacatggacagttagatacggggtaacagttgtaatagaatgaaaacaggtctgtggaatcagaaaggaccctccgctggagacaggaaaagctttcccagtgacaggcagctagacttagcttacttgataatctgaagtagaactattacattctgatttttttactgacttagttatttatctgttccatttttccaaaaggttgtaccagtagaagattatggaagattttgtcattgacaattggtggaaccattgccctttgcattggacttcttacatctgtctaccttgccacgttacatgaaaatgatttatggttttctaatattaaggtatggagtttctttgaccattgtatcattcactcagtgggatctccagtagtaagccatgtggatgaatgaccaaggcaacacagttttgccataaagaatccaatctctagaaaggttggactatagagtgaaataacttttgtgtttattattttaaaataacatattagaatctttttttaaatttttctttattatttatttatttttgagatggagtctcactctgtcacccaggctggagtgcggtggcgcaatcttggctcactacaacctctgcctcgcaggttcaggtgattcttctggcttagcctcccaagtagctgggactataggtgcgtgccaccacacccagctaatttttgtatttttactagagacggggtttcagcatattgaccaggctgatctcgaactcctgaccttgtgatctgcctgtctcagcctcccaaagtgctgggattacaggcgtgagccactgcgtccagccagaatctttatttttcattttaattttttgagatagggtattgctctgtcacccaggctagaatgcagtggtgcaaacatgggtcactgcagcctcaacctcctgggctcaagtgagtatcctgcctaagcttcctgtgtcactgggaccccaggcatgcaccacctcaccaagctaaatttgatttttttgtagagacagggtctcactttgttgcccatgctggtctcgaactcctgggctcaagcgatcctactgccctggtcttccaaaatatgagaatgagccatagcacccagcccagaatttttataatcaagtgagttttttctttttcattaacttattccatttatttagcagttattctaaattagtatttttcaagttatagattgtgaaattagtgcagtaggtcatgagtaacatttttcttaatgaaatcaaaaagaaagaatactatcacatctagtagggttgaggattgttttgtgaaacttttaattttatatatatatatatatgcacaaactgggtcacagtatacaaggtacttccttttcttttttttcttgttggctacaacaggaaaaaaaaaaaacagaaaaggaaataaaaaagccactgctttaaatcatggggtctaaatgtggctccacagagggtcctcagcatgttcatgactatctaatactctgtgcaagtggttttgcagggcatagggcgatggggaagccatatgtttccagggaaaggaactgtaattttaatcagattttcaggagggttagccgggcgtcacgcctgtaatcccagcactttgggaggtcgaggcgggcagatcacttgaagtcaggagttcaagaccagcctggccaacatggtggaaccctatctctactaaaaatacaaaaattagccgggcatggtgacacacacctgtaatctcagctactcaggaggctgaggcacaagaatcacttgaactcgggaggaagaggttgcagtgagctgagatcccaccactgcactccagcctgggcaacagagcaatactctttatcaaaaaaaaaaagaaaaaagttgagggggtggtctgtgactctttaaacacgtttccttgttttctttctctctctctttttcaacatttctagaactcctcttggcattgttttcagaactcgtatataacttacatgtggaaatttgcatccaaatataccttacattttaatctaatatgtcatgatctttaacctaaactgtggtgtctaatgactagttgcttgtaaaaataaacaaacaccttcaaagccaaagatgtgtatctataagaatgttcgaaagaagtgactgatgaaggatctgaagacattttccaaagaaagttttccaaaacattttgagctttgattctcttactgaaatgagcctcgaaaggatattactttgatgacaaatctaatttataagaatgacctctagtgtgtttatttttaaaacttgctgtgttactttatgggtacagtatatatatctttatacaaattatcatagtaccaaagaagaataattctttttttttttaattattattatactttaagttttagggtacatgtgcacaatgtgcaggttagttacatatgtatacatgtgccatgctggtgcgctgcacccactaactcgtcatctagcattaggtatatctccctatgctatccctccccctccccccaccccacaacagtccccagagtgtgatgttcccctcaaagaagaataatacttatctttcagtgacagtaggtagttcttcttgtcagaagaattttactcgtttatatatctttttttgggaggagcgggggcgggcagggtctttctctgtccccaggctggagtgcaatggcacaattacagctcgctgcagcccccaaactctgggctgaattgaagcattactctcaccttagcctcccgagtagctgggaccacaggtgcacgtcactgttcccagctaattatttaattttttgtagagatgggcctactatgttgcccaggctgttctcaaactcctggactcaagcaatcctcctgcgttggcctcccaaaatattgggattataggtgtgagccgctatgcccacctatctctttaaaatggagtgctggcagggcgtggtggatcacttgaggtcaggagtttgagaccagcctggccaacatggtgaaaccccgtctctactaaagatacaaaagaagagggccgggcgcagtggctcacacctttaatgcccgcactttgggaggccgtggcgggcggatcacgaggttaggaaattgagaccatcctggctaacacggtgaaatcccgtctgtactaaaaatacaaaaaaattacccgggcatggtggcgggcacctgtagtcccagctactcgggaggctgaggcaagagaatggcgtgaacctgggaggcggagcttgcagtgagccgtgatcgcaccactgcactccagcctgggtgacagactctgtctccaaaaaaaaaaaacaaacaaacaaaagaaattagccaggcatggtggcacatgcctgtatttccagctactcaggaggctgaggcaggagaattgcttgaactcaggaggcagaggttgcagtgagctgagatcatgccactgcactccagcctgggtgacaaagtgagatttcatctcaaaaaaaaaaaaagaaagcttgtaaagcgattccctagaattaaaccatgtagtgcgtatatattaacataagtattttgaaaaaaggctgaaatatctctgtgtgagcagatagcccaaattgaatgctaacaaccgtatagcaaggagacatgttgaaagagatcatataacttaattataaactattaagtgtagctctttaatttaaaacttgtaaccagccttcctactttccttaaataaatacaccccatcatcaagaaacttgaacacccttggtttttctctctttactttcactgggttaaggaagttctagttttacctagtatttactgagcacctgttctgtgggtaacattgagttcaacactgcagagaacatggaaggaataacaaagatttctgaatttaccagcagattttccagtatagtaagtgaattgagtaaatatatattaagcacctacagtatgccagcaggcactgtgcttagtggtagcagtatcactgagtaagataaggccatgcccccaaggaacttacactcttgagaaggatacaggtcagtatccagacaattacaggacatcccaactcggtgctaggatggggtgagatagagagcactgtgggagcacataggagtggaagcctaacctcattttggaagatcagggaggcttttctagaggaaatgatggttaagtagacctgaaggatgagtaagagttaaccaggcaagttggggaggaaagatgagtgtcctagaagagggacaagtgcaggaaattcaagacgcaagagagcctggtgtgtgaagcgttggcagtagttcagcctggctagagagtacaaggggagaggggatgtactgggaatggtaaacagaggccagataataaagggtctgtcttctctgtctcaaagatagaactctctctgaatgtattatagtagtgaaccctatttttagtagaggcagcgatgtcatcgtattggcgtttcagaaagttgccttaggctgtgatgtggaaaatggatttggggagagcaaaactaaagtcaggaaactgctaagataatccaattcagtggattcagtaatatttaaatattgcattcaaatattcagtgagtatcttctgtatgccagacacttttctaggccctgggaataaagcattgaatacgacatagaacttaattatgatgaaaaggggaaaaatcagaaagaaaatgaaaatgaatcctacggtgaaagtcacacgggatgatgagatagtcactagaaggctacttggaattgggaagtaaagccgaccactttgaggacatgtaaaccaaaacctacatgatattatagaaggaaccagccaagctaagatctgcgagaacattctaggcagaggaaacagcaagccaaaagtctctaaggtaggaatgaacttggcaaatccaggatcagagagaaggtgcatgtggccagagttttatgagtgatgaggagaaggtagaagagaggagaagaacagatcacttagggctttgaggctgcataagagttgcagagtcgtgaacagagtcagagctttttaggaagtggacttggaaggatgtcttgattcattgtgtggaagtctgttgagagagaacagttgagaggctgtcagtccaagctgcttgctctccttagcagcggggtggatggatggacatgccattttctgtgacaacgagcaccgggaggagcagagctggaggatcagtaagttctgacaccagctatccaccgttaggccaaaccccacaggatgagggcacagctctctacaaaaatgccttcgtttcacacaccagtggcacgtttggggcccccccaggcaaccctcacttctgaccagctggctacaaattctgaggttcccaccacccactcaggttcaataattcactagaacaactgacagaattcagggaagtgctatattatgactacagatttattatagcaaaagattacaaatcagaacgagccaaagggagtgacacatgcagccaagtcttcgagggtcccattggaagctttcattatcttttccccatggagtcaggcctgttaccctcctggcacatcactgtgttacactatgtggagccaaccaaagaagctcttctgagtactggtgtctagtttttattgaggtttcgttatgtaggcatgattgattggattattgcccacaaggctggactcaatctccagcccttttctgctccttagaagttgggctgctagcacatggctcaaagccctgactctcaggccacatggttgagtgttctggcttggccagccccaatcctgagtcatctccttagcacaaattaggagctcaccctgtcacctgctagcccaggctttcagatgaggtctgaagaacctaccatgaataacaaagacactctcatcacttagaagttccaaggatttagaggctatctcccaggaactggggacaaagagcagccagattctttattcttagagggtagagttttgatatggtttggctgtgtccccacccaaatctcatctttaattgtagttcccataattcccacatgttgtgggagggacccagtgggaggtaattgaatcatgggggcgggcctttcctgtgctgttctcatgatagtgtcacgagatctgatggctttatttattttaatttttttctgagacggagtctcgctctgtcgtccagactggagtgcagtggcacgatctcagctcactgcagcctccgcctcctgagttcaagcaattctcctgcctcagccacctgagtagctgagcttaacaggtgcgtgccaccacgcctggctaatttttgtatttttagtagagatgggatttcaccatgttggtcaggctgatcttgaactcctgaccttgtgatctgcccaccttggcctcccaaagtgctggaattacaggtgtgagctaccacgcctggccagatctgatggttttatagaggggagttccccgtcacacactgtctgcctgccgccatgtaagacttaactttgctcctcattcactttctgccatgattgtgagacctctccacccttgtggaactgtgactccattaaacctctttcctttataaattacccagtcttgggtatgtctttattagaagcatgaggaatggactaatacaaggttacctccccgtaaccagggacagaggtcagccaaattctttcttgcacaggaggaaaggcagggaacaatgagctcaggtttgactatgttgtgaggcacttttaaagcagtccacctagaaatacagaataaaggaagctagacttacggggctgaaggcaggagttccgtctgtgttggaaatgggcattttcatcttaccatcttgtagatgtgtgggtgagattgtttcaggagcgtgtaaaatgagaaaggaaagagaacctgggccagtttgtgtctgtgcctcagataccatctgggaagctataaaacaggcgcttttccccacccaccacccttgtcctctgaaacttacaattgagctcagagtcgtatccatttttttcctctttgttcaagcagtagtccatagcacacattttgggttgtctcctatatcacaagaagaatcctccaatgttagaaccatttctcaaacctgttaatacctctgcctaggcatttggttttgtgttttgcttagattcgctagatcagcattgtccaataggactataatgaaggaaatgttcagtgtatgcactgtctagtacagtggccacatgtggctattgaacacttgaaatggggtagtacactcgggaactaaatttttttttaattaatctgatttaatttttaaatatgtacatattttctgtaaataaacaattagaaattataaatatcactgaacaaagaccttatttggccaaagaaaagctcatttttggagtgtatattcctttataaatctcctgtaatttataccatttctatattggggaattatttgagaagagtaaatctgctttcctttcctgttttggggttataactttttctcatcaaaattggtaggttagtgtttaatgaaaatactttgattttatttttgaatactttgaagtagttgtaattattcagagagtaaaagtattggttatgtaatagacaagtcatacactgaatttatgcattcaaaatgattttttaaatgtttgttgtattgtttgtatatgaaaagtgggaaccctgaaatagcaactggaaagttgaaggaaaagatactggtttcatatagtagtataaaagatatatctagtatcctttctcagcatatttttaaaattttaagttatttttctattgtcttcattgtattatatttcccttgctaggaaattgaaagtattcaagattttttaaaataccctttattgaatgtctgttacatgcttggaactatttgggggcattttaatacatattgtatttatttgtacctttttttttttttttgagacagagtctcgctgtgtcgcccaggctggagtgcagtggcgcgatctcggctccctgcaagctccacctcccgggttcgcgccattctcctgcctcagcctcctgagtagctgggactacaggtgcccgctgccacgcctggctaattttttgtattttttagtagagacggagtttcacagtgttagccaggatggtctgggtctcctgacctcgtgatccacccgcctcggcctcccaaagtgcagggattacaggcatgagccaccgtgcccggcctatttgtacctattttttgagacaggttctcactctttcactcaggctggagtgcagtggtgcaatcaaggtcactgcaaccttgaactcctgggctcaagcagtccaccaacctcagcctcccaagtggtgccagctaattttttcattttttgtagagacagagtctcactttgttgtacaggctgttcttgaactcttggcctcaagcaagcctcccacctgggcctcccaaagttctgggattatagacatgagccacaatgcctgacctacatattctgtttaagctgcctatcttcagagcccaaacactaactctaaattgtcctttcaatgcaacctacttttttactgccctttattgtaaacaaaaagtaaaaggcactcccccattttttttttttttttttttttgagacggagccttgctgtgtcacccaggctggagtgcagaggcacaattttggctcactgcaacctccgcatcccagattcacacggttctcctgcctcagcctcccgagtaactgggattacaggcaggcaccaccacgcccggctaatttttgtatttttagtggagacggggtttcaccatcttggccaggatggtctcgatctcttgacctcatgatccgcccgcctcagcctcccaaagtgctgggattacaggcatgaaccaccacacccagctagtaaaagcctgttttcttacttggtgttctgcccttatggtgcctggcacgtcatcagtgctaagtagcttccagtcttctgcaatagagtcaactgctggggctgaggggtatggggtaggcagaggaaaaggggaggcactggctgctgtgaagaatctggatgggaactagaaccaaaggacatgacttccggagcttgccttcaaggatacgatatggttagtcatggcaggtacaggagccagtggatgcattttaagtgatttttgtttagtagttttgtttttttttgttgttgttgttgagatggagtctcactgtcgcccaggctggggtacagtagtgtagtcttggctcactgcaacctttgcctcccgagttcaagcgattctcctgcctcagcctcctgagtagagtagctgggattataggtgcgcaccaccgtgcccagctaacttttgtatttttagtagagacgaggttttgccatgttggtcaggctgttctcaaactcctgacctcaggtgttccgcccatctctgcctcccaaagtgctgggattacaagcatgagccaccgcggcctgccatgtgtttaataaattgtatagtagacatctgtatagtcttcatttttagtttttgagtgtgtattgttttttaattattgaaactatgttgtaacaatgatgaaaaattttaaatgaaaaacattacttaatattcattacccttaacaaaaagcagttttcatttttcccttccattcttcatcctaagtgcctaaatattttacttatttatgaccccattatagttagtttttataatctaccttatctgctgttacatactatgctttttccatatatacattttcacaaaacttttataattatgtaagtagttatggttttataatttcatatttttgaagtttttattctcttgattattccactatttccatgctcccaactttggatagttagattgtttataatagtacagttaaatcctaacagtgcttacttattctcactttaaagtggcaatgtagtggtatcagttccttctttcttggaattccctcagagcaattaaggaatgtgaaaaatagataatcaagttccagctttgatgaagggggctgccaaatccagtggcactcagaaagatgctgagagaagagtctgcggccaggcaaggtggctcacgcctgtaatcccagcactttgggaggccgaggtgggcacatcacttgagtccaggagttcaagaccagcctggccaacatggcaaaaccctgtctctactaaaaatacaaaaattagccaggtgtggtggtctactcctgtaatcccagctgaagcaggagaatcgcttgaacctgggaggaggaggttgcagtgagtcgagattgcaccactgcactccagcctgggtgacaaagcgagacttcatctcaaaaaaaaaaaaaaaaaaagagagaggagtctgtaagctgcaggggtcagataaagtgagtaaagtgtcgtcctccaaagttagtggcatctcctaaggggtaaaaccaacagcaccctgagtaggaccatgggatgggtgtgcaggcagtagtggcagccgctatcttggatccactctgctatgaagaacagcatgctaggcaggccagaaggagcgatcacagagacaagccatatttgttaagagatggaatttaagaggacaggaatgaagggaggcaacctgcatttcgaagatccccaaagctatcaagttctgttgactaaaatgaggaaaagactgaagaactcacccttgtaaaccaccctatacaatgaaaattcttgctgacctgagctgtgtgcctggcctcacccccacatgaacttcctgcaagtagcttgtgtagtaagaacttgccacattctgacataactgataaggaaggaactgggacaagattgtccggtgatactgcaacaaaaaagggaagagaacaacaagcagacatcattggtgaagaacagtcaccagaataattttacagtggagatgtggaggttgtaaccacacgtgtcacattaaaagataatcctttgccactgtggaagatgaatacaaagcagaaacataagaaggtatgtgccttcttcaaggggaaacaggaagagaacaaaaggaagtgaaatatgaactggcagactttagacaagaaatagaattacaaagtagaatcattatagaaattatgaccgtctcagatgcaacatacaggagactggaatccgtagaatgtacagaaagagcaatgttggacaggactgagagaggtcaacaaaatgaaaggagattgaataaagtgacagtatgagaaagcaagtgacaattgaggacaaagagcagcaagcatgcatcatttgtgtcccaaaaaaagagaacgagaacaataaatcaggaaaaacacacacacacacacacacacacacacacacgtttaaagatgtaattcaaggaaactttccaaaagtaaaaggaaatttgaatctactaattgaaggggcagagcagtttccaggataaattggcctagaaaaatcattagcaggatagagttctctgaagttgctgaacttaaatatgtaaagaaacctttggacattctagacgaaaagatcaagttaccaataaggagaaacaaaagtcaacctagcattcagtttctccacagtaatgtctaatggtcaaagaccatgaatgatgcctagaaaatgctcaagtaaaagaaagtgatttacacattttaacccagtcattccattgcatataaagatggcatacaaacttttttgttcctagaaatatgtacttttaagaatacctgaagaaattggaagaggaaaaacttcatccatccatgagatacatggaaaaacaatgacagaaagatgctcagtggggctcaaatttatttaactataggactaaaactaaaaattagtgatagaacaaaatgtgtatgatataaataatgttatattaggtacaaaagtaatgtaggtcttgtcattaattttatttatttatttatgaaacagagctcgctctgtcgcctaggctggaatgaagtggcgtgatcttggctcactgcaacctccgccttctgggttcaagcagttgtgcctcagcctccccagtacttgggattataggcatgcaccaccatgcccagctaattttttttttttttttttggtatttttagtagagacagggttttgccatgtcaggctgttcgagacatgccaggctggtctcgaactcctgagctcaggcagtccatccacttctgcctcccaaagttaggattacaggtgtgagccaccatgcctggccgccattacttttaaatggcaaaaaccacaattacttttgcaccagtctaatacacaagaatgccaacataagtaataatgttataatgcataataataacataacagtgtaatacgtataacacaagataaaagaagaaggggaagagagggtaaaagatggtggaggctgactgggcacagtggctcatgcctgtcatcccagcattttgggaggccaaggcggcaggatcgcttgagctcagtagttcaagacaagcctgggcaacatggtgaaaccccatctctaaaaacaaaaacaatttgccaggcatggtggcatgtgcctatagtcccacctactcgggagactgaggtaggaggatcacttgagctcaggacacagaagttatcattagctaagattgtgccattggcctccagcctgggtgacagaatgagaccatctcgaaaaaaaaaaggttggggaggccagctggcacagtggctcacagctgtcgtctcagcactctggagggcaaaaggtgggaggattgcttgagcccagaagttcaagaccagcctgggcaacatagtgagatcccatctctacaaaaaatttttaaaaaattagctgggtgtggtagtgtgcacctgcagccccagttacttgggaagctgaggcaggagggtcacctgagctggggaggtcaaggctgcagtgagctgtgatcacaccactgcactccggtctgggcaacagagtgagaccctgtctctaaaaaaaaaaaagaaataaataaaaaaaaatggatgggagtatcctgatttctttctcttttataactggaagtcagaaagtttgatttaaaactgataagacacacaagcctgggcaacatggtgaaaacttgtctctactaaaaatacaaaaaaaaaaattagccaggcttggtggcacacagcttacacccagctgcttgagagggtgcaatgggatgatcacctgagctcaggaagccaagtcttcagtgagccaagatcatgccgttgtgctccagcctgggcaacagagcaagaacctgtctcaaaaacaaaaaaaggtctctgtagatcttcaagttgacctacagagtcaacatgatccctctcagaatcccaggtggacttttcacagaaattgacaagctagtcctaaaatgtatatggaaactcaagggactcagaatagctaaaacagttttgaaaaagaagaacaaagttgtaagactcaaactttctgacttcaaaacttactatacagccacagtaatcaagactctgatgctggcataaggatagacatataaatcaatggaataaaattgggaatacagacataaatccttagatggtcaagtgattttcagcagggcaccaggaaggacagttacgtggagaaagaatagtcttcaataaatggtctataaacaaatggatattcacatgcaaaagaatgaaattagaccactgcctcacaccatacacaaaaattaactcaagatggatcataggcctaaatgtctaaaactataaaacatttagaagaaaatatgcaaatgaatcttttataactgtggagtaggccaaaacttcatagagaccacactaaaaacacatgattaaaaataaataaataaattggtgttcatcaaaattagacatttttgtactccaaagtacaccatcagaccaggtgctgtggctcatgcctgtaatctcagcagtttggaggccaaggcaggcagatcacttgaggtcaggagttcaagaccagccgggccaaaatagtaaaaccctgtatctattaaaaatacaaaaattagccaggcgtgatggcacacatctgtagtcccagctactagggaggctgagacagaaggatcacttgaacccgggaggcagaggttgcagtgagctgagatggcgccactgtgctccatcgtgggtaacagagcgagactctgtctcaaaaaaaaaaaagaaaaaaattaagactcaaaagtcaaaattattccttgatccatgggctgtagaatagattttgtgttagcaggcatgaaaataacacagataaccagatgcattatcaatgagcagtagtattttgaaaagaattttttttttctgtgtagtagatctcaacagtgggcctaaaatagtaaatcgtgctgtcaacacatgggctgtcatccaggttttgttgtccatctttagtgcacaagcagagtagatttcacatcattcttaataaggaccctaggattttcagaatggtaagtgaacattggcttcaacttaaagccaccagctgtattagcccctaacgagagtcagcctatgctctgaagctttgaagtcaggcattgacttctcctgagctgtaaaagtccgagatggcatcttcttccaatagaaggctgtttcatctacattgagtatctgttgtttaatgtaggcaccttcatcagggatcttagctggatcttctggatgacttgctgcagcttttccatcagcactttcagcttcaccttgcacttgtatgttagggagatggctacttcccctcaacctcatgaaccaacctctgctagcttccagcttttcttctgcagcttcctcacctctctagccttcacagaattgaagagagggccttgctctggattaggcgttggcttaagagaatgttttagatgatttgattttccatcagagcattagactttccccgtatcagcaatgaggctgtttttcattcttatcattggtgcgttcactggagtagcacttttaatttccttccgtaacttttcctttgtgttaacaacttggctctttggcacaggaggcctagtttttggtctctctcaactttcgacatgctttcctcactaacttatcatctctagctttccatttaaagtgagagatgtgccacacttcctttcgacgcttagaggctattgtaaagttattaattccgatattattgtgtctcagggagcagagaggcctggggagaggaaatgagacagaagaatgacagagctgtcagaacacacacatttcagttcaccgtcttacatgggtgtggtttattgtgccccaaaacagttacagtagtattaataacatcaaagatcactgatcccagatcccgtgacaggtataataataaagaaaaatgtgaaatattggaagaattactaaaatgtgacagagacaaaaagtgagcaatagctgttgcagaaatggtgttgatagttgtttgatgcatagttgccactaagtttcaatttgtaaaaatgcattatctgcaaagggcgggaaagtgaggcacagtgagatgaggcgtgcctgaagtcgtttccctttgtttacaatgtgttctttctttggtgtttcgttgtttgtttgtttgtttttgaggcaggatcttgctctgtctcccagtctggagtgcagaggtgcgatctcggctcactgtagcctcgacttcctgagctcaggtgattctcccactgcaacccctcaagtagctggaactacaggggcataccaccatgcccagctaattttttatatttttagtacagcctgggtcttgccatgttgcctaggctggtcttaaagtcctgggcttaagtaatccacctacctcggccttctaaagtgctggggttataagcgtgagccaccgcacccccgcattcttctttcttgttggaacataaacatctttcggtcaaatactaaattcttgcacctttttgtttccccagcaaataaatatgcaatgataaggaaggcagttctcctttggctataagcaccaacatcactctttctttttagtcttttttccttgtgctaacattttccactgttattcttatttacttgatattgccgaatttgcatgtcttcccattgaatactcctgcaaagcaaggagactttagaatagataggggtaatccacacaatagtagtacggtagtgctaagactgctgattgcctgagtgtgggcccagtggaagaactgtcacttcagtagcagactgccctcctcacaagccctgcttggcacttctcacatgccacggctttaatcaactctggggcaagaatcattcccctctaacagatggacatgaatttaaccagacaataaaccatgtatgtgccataaatatgtttgctgagggcatgattcccagtacagaactttaagaacagctgtcttatgggctactatttcttggtgagatgatttgttaacctaattctgaaacagattacatttataaagttaatttttcggtggcttccccactactagcagtctaattattttgggggacaatttttgtaaacaaatctttttttttttttttttttttgagacagagtttcactccatcacccaggctggagtgcagtgccgggatctcagctgactgcaacttccacctcccggattcaagcaattctcatgcctcagcctcccaagtagctggaattacagacatgcaccacaatgcccagctaatttttgtatttttagtaaagacggggtttcgccatgttggccaggctcgtctcaaactcctgacctcaggtgatctgcccacctcggcttcccaaagtgttggggttacaggtgtgagccaccgcgcctggcctgtaaacagaacttttttacgtgagttgttcttgtttttttaaacatgagttgttttgttttttttaaaaaaaagcaagaggagaaagacttcaggaccattgcgatagatgtagggaccactgcaatgaggtcttgcagtggtggagagagattgtactcaacttctagtacatcatgggtgagtaggaataggcagccaaggagcggattggggtcagtggctgggaaatgagtaagaggaaccactgggatgcgggggatcctggctcaaccaggcttagagggttcttgctaaaggcaggccagagtgaccagacattatgtgggggatctatttacgtgagatttttaaaaagctaatttgatgtttcctttccaaatttggtgtcatttgtctcaaaggactctagccttttgggcattgccagcaacttgtctgagtgcctgtggggaatgtgatcatttattgtgagcagtcattttttgtgtgtgtgtacatctattaaattgctatatacactgttacttcaatggttttagctgtacagttttttttttgttttttttcttgttgttgttgtttgtttgttttgagacggagtctcactctgtctcccaggctggagtgcagtggtgcgatctcagctcactgcaacctctgccctccgagttcaagtgattctcctgcctcagcctcctgagtagctgggattacaggcgcctgccaccgcgcttggctaattttttgtatttttagtagagacggggtttcaccatcttggccaggctggtcgtgaactcctgacctcaggatccacccgcctcagcctcccaaagtgctgggattacaggcgtgagccaccacacccggccagctgtacagttctttataaatacaagtcttttgtctttccacttctttctgtcattatcttcgaagatgttttcgttctgtcaacattgcattccccatggaacctgtgcaaattgaatatgaagtatttgttcgttttgcattctttagaggataactactattggtgtatattttcacgggtgtgatctaccaagcgaagtataaattgctgtaaaactggaaaagtgtttgaatgagtgaagcagatgttctcttagcatgaagcagatgtaaaacttgcaagtgtctgtctaataaagtatagcatttggttctgtacagctggtgctagattaccaattaatcatgtttgaatgcatttttactaattaggtccccctctgttctttgtgcattctggctataataaagggagagatgggacacaaaagctttctacctttagtactttgagcagtgttttttcttattccctggtcttttattcttagaaccatataattcactctttcattctttattggctctccagtttgatttgggatgtaggtgtgacaggattttcacactcctcaagtgcctttgaacactttaaggaagctagagaaaagaaaaataatgtaattaatgttgttgttgttgttcttaatttgcatggacaaaagctagtatttgctcagttaacatcaattcatagcctctgtggttatttgaatgagtaggagtttggacattctagaaacgagtgataccaggttggttttaagttctcaaaagcaatagagcacgttttctcaaagataaaaaatgagtggattaaagtaactacccagaagagttgcctttactgctatgaaagatacaacacaaatcactagcaatgaaagtttaaaaagctgtatcattatgtagtagcctttttataacgcaagtgtgttattgaaattaaattttaggcccaggcactgtggcttctgtctgtaatcccagcactttgggaggccacggcaggaggatcacttaagctcaggagttcaagaccagcctgggcaacatggcaaaaccctacctctacaaaaaatacagaaattaggtggacatagtggcatgtgcctgtaatcccagctacttggaagccgagaggatcacttgaccctgacacgcaaaggctacgatgagccgtgatcatgccaccgtactcagcctgggtgacagagtgagaccctgtctccaaaaaaaaataaataaatttcagaacctgatgggcctttttttaaatgcttgatttccccaggataaattggttttctgtgaaaggaagttcaatatataagatttgctaccctacctcccatttttctaaaaggaattaacaaacaatgataaaaagatttagagggtagcagaaatatattaaataaataatttctaagtctgaagataatagcatgaatggttctttcttatttatttatttatttattttttgaggcagggtctcgctctatcatccaggctggagtggcttgatcatggctcacagcagcctcagcctcccagtaggctgagtctcaatcgatcccccttcctcaacctccccagttgctgggagttcaggtgcatgccactatgcctggctactttttttttttttttttgtagagacagggttttgccatgttgcccaggctggtcttgaactcctgagctcaagcaatccacccacttcagcctcccaaagtgcatggctataggcatgagccaccgcacccagcctgagtggttcttttaatgagatgtttattaccatttgaaaattagttggagttagggggaagcaaaatgagctaaaagaagttcatcagctagaaaatgagatgttcagtatttatcactttcccccattgggtttgtggaatgtgaatctgctataatatgaaaaagcatggccgggtgcagtggctcacgcctgtaatcccagcactttgggaggccgaggcagatggatcacctgaggtcgggagttcaagaccagccttaccaacatggagaaaccccatctctactaaaaataccaaattagccgggcatggtgcacatgcctgtaatcccagctactagggaggctgaggcaggacaatcgcttgaacctggaagttggaggttgcagtgagccgagatcgcaccattgcactccagcctgggcaacgagtgaaactccgtctcaaaaaaaaaaaacagatcgaattatattttagacagtgtgttacagattttaggacatggtttgttttgttttgtttttaacactggtgtaaaagaatctctaataacatagattataactttttatttatttatacttttacaggtacaggttaagtatccctcatctgaaatacttggggccagaagtgtcttggatttcagattttggattatttgcatatatataatgagaaatcttggggataggattcaggtgtaaagatgaaattcatttatgttttatgtataccttatgcacatagcctgaaggtgattttatacaatatagttcataaaacaaagtttgtagacactgaaccatcagaaaacaaaggtgtcactatctcaaccatcccagtggacagtctatggttatttggcatcaccattgttcctgactctgaatttacatggtgcctttataagtaatcattttgttatacttattcgtacataagtacttaacaataaaaaatatgacataccatcaatacggtgaaaaaaataacactttcagggtaacttgtgtcatcgtgttggctctcagaaggtatccaattttaaagtatttcatttggatttcagcttttcaggttagggctgctcaacctataaataaagtgtatcatctaacagtattaattggattattccagaaagtcttccgtgtcattgttgcccattgcttctgttttatagtaataatttaaatttaataaaagtatcttgtaactaaattggctaatagctatttaagttttcagttcttctagggttgaatacttatctaaaagcagtttaaatatttcatgtatccatttacctgcataaacctcttcccaccagggttacgcttgtcagagtaaaattcatgtgtctgccttatttgactacaaataccttttattcttagaataaaatgaaaatgattgatcttatgtaatattggtagcttttaggtaggtgtctaatgcaattatatttcttttcatttttttttgtgccatccctgttttgtgtctcactgctattacataggaatggtgatgtattctttaaaattttttttaagattaaacattcactaaagtagagaatagtaggacagactcccatgtatccctcactcagctttaacagtgatcagccttccattcttgtttgccaagattttttgagactatattttcagagttttttctctttcaagttgcagttatgtatcctttctacagtaacaatatgtatttaaacaaaactaggtcacataaacccataggatctaactctgttttaggaagtggagcgagaaatctcattcagaacagagtgtggcctgtattactcctactacaagcagatgctgcaggctccaaccctcgtgcaaggtaattacaactgatagtttcatttggggtctcctgcatttttttcaatattttagtgagaagtactgtgcactaaaaaccacttaaatgctctctagaacatgtgtatttttccgtgctaatgtctaatcatttcatgaaaatgttttttgctctggaagaagttatgtaatactttatataaccctcctctctttgccttccagctctgttccatcccaaaagtaatatctttgcaatttcatggttttgttgctgaattttctcatgatcattttggaggaggtctttgcaggtgaaaggagtattgtctgagaacaggaggcattttggtaacacaaatgaaaattacagttgtgcctcttgtccccagtgctccattcattcctttatttcacagttgccattttcctgcatttttacttcccctaagtgggttagaccccacactctgcctttactccatctaatgaaagccccaacatggatctcttctacctagtacatacttgatcggcttagcatgagtgcatgtgacagaaaactgctcttttataggctttatttggagtcagctttgacatttttggtggcagttattcataaattatttttttgctgttgtttttgagacagggtctcactctgtcgtccaggctggagtgcagtgatatgatcatagctcgctgtagtctcaatctcccagcctcaagcagtcctcctgcctcagcctctcaagtagctgggactatgggtgtgcactaccacgttcattttttgttttgttttgtttctctgtggagacgaagtctcactgtgttgcccaggctggtctcaaactcctgagctcaagtgatcctcctgcctcagcctcccagtgtgttggaattataggcatgagccaccgcgcccagcccataagtgatgttttttacttgtagttttatcacctaggagacatgacattttggttatctttggttttgtgccataaaaattaatgagttggtccctgtgatgatagccagattcatccataataagggtaattaatcaccagcccttcgcttagtggttttagcagccattgatgattatcgtctgtagttcttatttcagaggggatgcaaattagtgaccttctaattctgtcattcctccttatttattagttggaactatgttatatagaaaaccttctcgttaattgtttggctaccttgcagtacagtttatacaagaaaagcaggcttagtattcattttttccccatacaatcaaaccttgttattcacagattccatagttgcaaaatcttttacttcctaaaatgtacttataaccctaaaatcagcattaatagtactttcacagtcattcatggacacgtccagagcaacagaatactttagcctctggcatgcgtgtttcccacagagactgaatgaggcgacactctgcctccttgtctcggctctcacactgcagtgtccttttcagaaagtctgttttatgccatgtcctttgcattgttttgctgtttgttgaagtttaaaatgatcctctgagcctgggcgcagtggctcactcctgtagtcccagcactttgggaggccgaggcggatggatcacctgaggtcgggagttcgagaccagcttgaccaacatggagaaaccccatctctactaaaaatacaaaaaaattagccgggcgtagtggcgcatgcctgtaattccagctactccggaggctgaggcaggagaatcgcttaaacctgggaggtggaggttgcggtgagccgagatcacgctactgcactccagcctgggcgacagagcgagactccgtctcaaaatagaaaagtaaaaaaattaactaattaattaaaacacgacagactcttaaatggcagaaatttattttctcacaattcaggaggctggaagtctgaggttagggagccacatggtcaggttctagggagggctctcttcctggcttgcagacagccaccttcttgctgtgtccttacatggcagaaagagaagagcgagttctctggtgtctcttcttgtaaggccactaatcccatcatgagggcccataactgtccaactcttaggttggagagttatccatccataacactcctgtgttagactttaggcttgccataatgtaataccacagactgcgtggcttaaacaacagagatttttctctcccttttggaggctagaagtccaagatccacctgctgttaggattggtttctattgaggcctctcttcctggctttgtagatgcccttttgttgctgtgtcctcacatagcctttccctctgtgcaaatgcagagagagcacaagggcaagctcttgtctgttcctcttataagaacaccagtcctatcagattaagaccccacccatgtgacctcacttaccctttattacctcctgtaggccctgtctccaagaacagtcatattagggcttcgggcttcagcatacaaatttgtgggggacacatttcagtccacagcacctcctattgaggaacatctgggttgttttggatcaatcttttgctggtacaaatggtgctgcatgagtgaccttgtgccaatgtcattttgtatttttgccagcctttgtgtgggattgattcctagacatgggctttctaggtcaaagggtaaattcatatgtgattttgctggatactgcaaaattcctctccatagagatgacaccattttgtattcccaactgtagtatataggagtctacttttttataatctcacagagtgtattgtaaaactttttttgccaaggcagtaggtgagaactagcatccctcagggtagttttaatttgcactgttttaataggagcaaggttgaggatcttctcctgtgtggaaggactgtgtgcatgttttcttctgtgaactatccattcatgccttggattaattagcctggttacagtgacagaggacctctgtggctgtggatctctgtaacagcaggtcaagttctccttcatccttctcatgacatgtctgctgtgagggagctgcagctctggtctgcccccaacatctgcgcattcaagccctatttggaatgtgccagtgtcatggcagagggcaagagcaagagctggtagaaacatgccttgtcttctaaagcctctgctcagctatggcttacatccacttacatgccactggttagagcacatggccaaagccgttctggggagtggagaaggaaggccatgtatactctcccaaaggagatactgcaggttgcatggcaggagggcagggtggagaaatgtgaaatcctcttgcccacatttctagagaaggaccttgtggtggtggtggtggtggtttcattccagttacaaaagttttaatttacctatgtttgtgtaaatgtttaaatgatgtccatcgaatatgtggtaagctctttgagggcaggagtatgttttttttgcttactcttatatccccaatgcctaccacagtctctagcacttactaaacaatctgtgcatagttttgaatgaatgaataattatgagtgtaattattttcttcctgacttttcacatatctataggttttcatggcctaatatatgataataaaactgaatctatgaagacaattaacctccttcagcgaatgaatatttaccaagaggtttttctcagtattttatatagagttctacccatacaggtatgttttgtgatattgaattattaatatcagatgaaagtcaaagtctgccattttgaactgaaagttatcacatcgttctttctgatcttcaactggtttagtagaaaatcagcaatactatattttttttccatgtatattatgaactttataagatactgctttttatttacataggatataaggtttttgtacacagatgcttcctggcttatgtatgtatgcggtctagaagctaataaatattttcatttgctctctgtaatcaggagtgattacacattcactcctgatggatctttgagagaaaaaatttgtaaagtcagcaaatcacaatgaccacttctcatgtgaatgacgtatcatcagacaaagttaggtataaaactttctagagtaaagagtgaagccagacctgtcacggacttccttcccctgtctcttctcggtggtgggaagaaaggctacccgaacgcttctctaatagatgaaaggggtgtgggcttgctgcttggaattagaggcaagctcctgcatattgtattcctactgtcatgttttaaatggcactgaggagggttagggctcacctgacaaacatgttttattgttcccttttacagaaatatttagagccagtttatttttatatttacaccttatttgggctccaggcgatctatgtcacagctctctacataaccagctggctactcagtggtacatggctgtcaggactgttggcagctttctggtatgtcacaaataggtgagttggagtcagtatgcttcttttttttccaaaatgtaagtaaaaatgaagtcacttcatttccagctcagagaaatttcttctgccacatttgtttggttgggagcagtttctctttggtttgcctggtggtttactcaatttttcttatttagttagggagaaagtgctacttacatgtaattccagctgaggaacagagagcattgaattgcatatcaagaaaatcattcataataatcccaaacctattatctgtttgctgggtgatcaagatttctccagccgcatatctcatctcttaaagggtttttttaaattggcaaataataattatacatattcatgggctacatagtgatatttcaatacatatagaatgtatagtgatcagatcaaggtaattaacgtatcagtcattaaaaagttttttgggtttttttcttgctgttttttaaagccaatgaagacttttaaaatttttatttatttaggggttgtttttgttttttgtagagacaggatctccctatgttgcccaggctggtcttgaactcctggcttcaagcagtcctcccaccttggcctcccaaagtatcaagattacaggcatgagctactgtgccttgcctaaaaagttttaattatatcttcactatcaaccttaatagggttgtgtatggctctcagttagtagagcttaaagataaaatgcaagggcgtttttgccttatttaatatctactattataagcagtagagccttatgaaatcacattttaaaaaaatgtattcaagatcattaaattattgcctgtcctataatggcaataccagtattcaataggagtcttaaaacttgaacatgagttctaatacaggttttattttgtaagtctaagcaaattacgtgttatgacagtcctgttgggggtttactgtatgccaagcactttacaatatgtgttatatgggttcttagaagaaccctatagagtagatattattattatccccattttagaaatgataaaattgaggctttaaaggttacattttgtatatagatacagatattacagacatctatatatatttcttttatatagagatatatgtagatatagatacattgtttgatacattgtttcatatatatctctatcttttatagagagatatatgtagatataggtaccttgtttgagatgtagatacacacacgtatattatgtgttacataagtgtatcatttattgaatgcctagtatgtgtggggatggtgtacaaagatgaaaaattttacccatacttgccctgttgggattcacattctagagaggcaggaagtttttttaaaaaatactgtcaatgacatatttaagactcaagtataaaaaacaccaaagaaatacagagagagggaaaatgtgtattgcctcttgacactaataaagtgagggagaaatgaaagtaagggtttggcatgatacatttgtgagtttaggagtaaggctaacctgggcttgaaccctaggtgctaagggcatacccatggacagagcacttaaatgttctctatgccaattttatgttacagggatgatgatgatgatgatgatgatgatgataaggacaattattgagaaccagtggccagaatcttaagtatacttgtccttaatgtaatatatctttcgttgaggaagtcttcgaggaaattattgtaaaaactatcactttggccatttgtgttttcttttgtgcagaatagataccacaagagttgagtttaccatcccactgagggagaactgggcgctgccattctttgcaattcagatagcagcaattacatatttcctgagaccaaacttacagcctctttctgaagtaagtgtttataaaatttcatatattttaatcccccaattttatatatgaagcttcaaaaaatgtgatgtgcttagtatcccaatgcatgtgaatagttcttattccatgaccaatttttaaacttgagttaaattaagttttcttttcgtgagcttttttctactttgcaaagaaaatgttttcatttttgatgttaaaaatgtactctacataatctacccttaaatagttgcagcaaacccacacacaatttctgcaaactgtcagaatttttaagcccttgctcttgagatgtgatttggtgcattatcgcctccataatagtgtggaatacacacaccgtatgtgaatatttatatgcaaagtgtcactttatgatagttagagcttaaataacaaatgcaagggttttcagagcaacagtttatggtttttctgtttggtttatagagatactggctgctcttgagaaaacttgtctgcaaggttttttattactagagacatgtaaattatacaaaggttttctttttacagaggctgacacttcttgccattttcatatcaacttttctctttagtctgacatggcaatttaatcaatttatgatgctgatgcaagcattagtgctgttcacactggactccctggacatgctgccagcagtgaaggtgagctttgctttcttttctcacttgagattttggccatttagtgtttttatatcatagaatgagatgaaaatatgcaagtacttatggataaaattgaagctgtttcttagatctgctgtaaatttgctgtggccaattgaagctgagtaatttatgaagcctagtttgaccatcttaacttttattcgcttattttaagttaaaaaatggaatggattttattttggggcataaatgcctaggtcaattgttatttatagagatgacttaaattttaaaatataagatagctcttttaaaatgtcttactgtgtactgccacttttaaaaaagaaatcaataggtatataacagcttttttgtagtactttataaaattttcatagtcacatttaactaatatgggatgtgaatccctgttgactggctgaaagtcacatgtgaaataaagaaaccagtatctgtctcctaatgtctgctgctgtcatttaatcacattttttcatgtgcaaaaatatgattttatgtattgcgtacagttttaaaatggcttatagttagtattctaaagtagtagtaacttaaatatttcccaagtataataaaatactttctccatatctaaggcagcagcatagcccaaggatttgtgctcatttattccatatcaaaggagatccagtaagcttccataactgactgagtctgaattaagaaacataaaagtctaccaagaaatacacattgcctgtctactgagacactgtaatagaatgggcactacagaaaatgccaatatgtgtaattcattgtcatagccacagtttgccttttagcttgggaaacaaagatcacagacaacaagaacaagcagacaaatgatagctgctaattagcaatactgatatatctaaaagaagaaaagttatttttaggcagagaagtgtttacagaagtaagaagctagaactggaccacctagatcacaagtgagggtagaatttgggtgggatgtcaggggtgggggcagaataggaaggtggaatgcagcaagagcaagtagataggactaagtttatatatgtatatgaaatgtttagtgtttctgcaggtgtgccagtgaccactcctacactgctggtaacctatacactcctataatctttctttagtgtagtttcacagtaggtatcaaaagcctaaaaatgtatttgccttttcaccaacatttctacccctataagtttgtcctaagtaaataatctgccatgttcattttagttgtattgtaataagaaaaagctgggcggaaaagataaaaagaaataaaaaactggaaatgacttgagccaatagcaatagggtatacttaaataaatgatggcatatctatgcaatcaaatattatataaccattagttcccccatatttttttgaaaaagcgaaacatagagaaaatgagtaaaggttctggaaaaatacacagtaaagtatcaacagtcagctacacgattgatgttctgcatattctttttgttctttagatcttttgattttttctgataatgaacatgtgtctctttttttttttttttttctttgagatggagtctcactctgtctcccaggctggagtgcagtggcgcgatcttggctcactacaacctccacctcctgagtttaagcaattctcctgcctcagcctcccaagtagctgggaatacaggtgcatgccaccacacccggctaatatttgtatttttagtagagacagggttttgccatattgcccaggctggtcttgaactcctgacctcaagggatccacctgccttggcctcccaaagtgctgggattataggtgtgagccactgtgcccatctgaacatgtatctcttttaaaattagaaagcaaaggtactgttttggctcacatacacaacattttaaaataatatagctaattgattttttatttagttctaaactttgttcaacttttacatttgaaactgtgttggtattagaagtagttttaagtatcagactttaaggaggaacattattacaatgaaaggatcctgagttataaaactaaattgctgctgtcaggtctgaaaataactggctctttcagcttaggcaagtgatttaacttagtttcttcataaattagaatcacttctctctaaccatgtcaaatgggaaagagtcagaataattggtatagaaaaaggtaatacaaattcagagctcagtgtggtgacaagaagcagtaccttctacagtacattttgtcatcttttcatgaatgatgaaactcttaccagcaaaacctcaagtttccagtcagaaatgtgaacagagtaaaacagaacagcaagcatattataaagtgtatacttttgcttaattaaaggctaaaatatggaggttaataaagttttcttaatctattgtggaaacagacgcattcatgataaatgcttaagagatcatgttaagtaccctacatggttccagacaagagggagtagagacatttctccccgttcctccccaaagtacattgaaaaaccttagacagtatatgtatataacaaacataagaggaatttgagaggtagagagaagcagactgcctagggaccttgcgaccagagggaaaatttgacagcgagtttcttgggttttctttttgccccatatatccttgactgggtgctggagaagtcagaaacctgggaataacaatggactcaaacaaaaagcctcctccctctagcaaaaggaccagaagagaggaagcctaacaagacagaaaactttcaaacattaactgccttattctagcgaaatgctacagaagcaaaaccacagctccactcccacctccatcagtaaagttcagtgggaagcctagattcctaccctcacctagctgtcactaggcatgccttgcttcctgccagagctatgtcagagaagtctagtggggaaccagaactttcaccatctcccagagacatctgtgaaggccacttgggaaacttggacttcaactctcactcagtggtaatgagacatcctgtcccctctctatcaggatggtgtcagagaaggtcaacagggaggttgagactctaaccaccacccagatgtaataagcctttctctactgccctaccccatgctgtcggtgcaggccatgtagggagcagtggtgacgcacctctgtttctcccagccagcatgtgtcagcagggacctgtagagagcctgaactttcgccttcacccagcaataaggaagtacaccttctgctgacccccagatgtcagtggagggcaagtgggcaccttggacttccatttccgtctgaaagtactgaggcagcacccttctttccccattagcatagcgttggcatagtttgaatgtttttgtggtcccccaccaaatttatatgttgaaacccaaatccccaaggtgattgtattaggaggtaggtagggccttttagaaggtgattagtgccattataaaacaggcacaagggagctgtttcacccctttcaccatgtgaggaggacacagcaagaaagtgccatcagtgaaccaggaaataagccctcaccagccactgaatctgccagttccttgatcttggacttgccagcctccggaactatgagaagtaacttttttgttgtttataagctacccagattacggtattttgttagataacagcctaaatggaccaagacacatggtgtcacaggaggcctgctaacatggcagatttaaataagatccagggtcccataatgtaataggatacagttaaaaatcacttcttaggccgagcgcagtggctcatgcctgtaatctcagccctttgggaggccaaggcaggcagatatttgaagtcagtttgagatcagcccgggcaacatggtgaaaccccgtcactactaaaaatacaaaaattaactggctgtggtggcatgtgcctgtaatcacagctattcaggaggctgaggcaggagaatagcttgagcgagccaagatggggccactgcattccagcctgggcaacggagcaagactctgtctcaaaaaaaaaaaaaagaaaaaaaaattcttatattaagaattaggaaaatctctcttgagtgaaaagagacaatcaatagatgctaacactgagatacacagaaattggaattatcttacaaggaatttaaggcagccatcataaaaaaaaagcttcattgagcaattacgaacacacttgaaacaaatgaaaatacaaactctaagcaaagaagtagaagatacaaagaagaagcaagtggaaattttagaacagaaaaattccagtaatcgaagtttaaaactcagtggatggactcaacagcaaaatgaagtagtcagaggaaagaatcagtgaacttgaagatagaacaatttagaaattacctaatctgaacaacaagaaaaaatagaatgaaacaaaaatgaacagagcctcaaggacctgtgagactataatgaaaagtctaacattcaggtaatcagaatcccagaagaagacaagaaaagagtttactgaagctgaaaaaagtatgcaaagaaatactttcggaaaaaatagttgaaatttcctcaaatttggcaaaagctataaaccttcagaatcagcaagctgaactaatatcaaacaggataaatccaaatagagccacactaagacacattataatcaaacttttggagactaaagataaattttaaaaaattgaaagtagtcagaaaaatactgtacctataggggaaaaccaatttaaatgacagtgaattcctcatcaaaatcaaggaggggctgggcacagtgactcacgcctgtaatcccagcacttttggaggctgaggctggtggattgcttgagcccaggagtttgagaccagcctgggcaacatgatgcaaccccatctctataaataataataataataaaatgattagccaggcatggtagcaacgtgcctgaggtctcagatacttgggaggctgaagtgggagaaattgaggcttcagtgaactgtaattgcaccactgcattctaacctgggcaacagagcaagacccagtctcaaaaaaaaaaaaaaaaacaaaaaacaatggaggccaaaaggaagtggcctagtattttcagatgcagaaaaaaagaactgtcaaggctgggtgcagtggctcacgcctgtaatcccattactttgggaggccgaggcagacggatcatggggtcaggagatagagaccatcctggctaacatggtgaaaccctgtctctactaaaaatacaaaaaattagccaggcatggtggcaggcgcttgtagtcccagctacttggtaggctgaggcaggaaaatggcgtgaacctgggaggcggagcttgcagtgagtctagatcgcgccactgcactccagtctgggggacagagcgagacttcatctcaaaaaaaaaaaaaaaaaaaaaccatcaacctacactcctatacctagttaaaatgtccttcaggaatgaaagggaaatcaaaacattctcaattaaggaaactaatattgccagcagtcctaccgtaagagaatagctaaaggaagttgttgaaacagaaaggaaatgataaggaatttaagagcatcagaaaggaagacaaggcaatgaaaaaagtaaaaatgtgaataaatataacagacttttcttattctcttgagtttctaaattacgtttgaggctgggcgtcgtggctcacacctgtaatcccagcactttgggaggacgaggtgggtggatcacctgaggttaggagttcgagaccagcctggccaacatggcgaaaccccatctctactacaaatacaaaaattagccaggtgtgatgatgggtgcctgtaatcccagctactcaggaggctgaggctggagaattgctttgaacctaggaggcggaggttgcagtgagccgagattgtgccattgcactccagcctgggagacgagtgaaacttcgtctcaaaaaaaaaaaattatatttgatagctgaagcaaaaattataacactgtcttatgtggttctctatatgtaaaagaaatactttaacaatataaatgggaagggtaatgagacttaaatggaggttagggttctatgcctcactcaaacagttaaaatgtctataccactagtccgtaataagttattaatgcataatgtaatagccagaataaccactttaaaaaactatacgaagcagtacatgaaaaaacagtacagataaataaaaatgaaattgtaaaaatgttcaggtaacctacaggaaggcaggaagaaggaagcaggaattagaagcaagcaaacaaaaaagaataaaagagcagatttaagactaaaatagcaataattacattaaaggtaaatgatctaaatatactaattaaagagatggcagggtggatttaaaaagcatgacccagctgttgtctaaaacacacttcaaacacaacaatatagataaattgaaagtaagaggatggaaaaagatacaacatgcaagtatcaatcaaaagaaaggagtagctatgttaatatcagagaaagtagatatcagagcaaagaaaattactagggacagaacagaacattatataatgataaaacgttcaatgtaccaagaagaaatagcaatcctaagtgtacctgcaccaaacaacagtactgcaacgtgtgtggggcaaaaactgacagaactgaaaggagaaatagaaaaattcacaatcgcagtttgagacttcagcacatctctctggacaattgatagaacaccagacagaaaatcatcagagatatagaacccaacaacaccttcaaccgacagaatctaatgatcatttatagaaactccacccagtaacagcagaatactcattcttttcaagcattcacagaatacttaccaacagactatctcccgagccataaaacaacgacaaacataaaagaattaggattatagagaatataatctctgactgcaatggattcaaatttgaaatcaatacagaaagataacaggaaatgtttcaatacttgggaattaagctcactattacatctatagtagtaatagccagaataaccactttaaaaatatataaagatatacactaaaaaagagtctaagaggaacctcggagagcattgaactcaatgaaaatgaaagtgaagcatgtttaaatttgtgggacacatccaaagcagtattaagaagaaaatgtgtagcactaaaaagcttatattagaaaagacagaaagtctgaaatcggtcatccaagctctcaccttaaaaaagggagcaaaataaattcaagccaggagaagaaaataataaagagcagaaatcaatgctattgaaaacatgaataatagaattaattaaaaagagctagcttggtcgggcacggtggctctgcctataatcccagcactttgggaggctgaggcaggtggatcacctgaggtcaggagtttgagaccagtctgggcaacatggtgaaaccctgtctctactaaaaatagaaaaattagctgaccgtggtggtgggtacctgtaatcccagctacttgggaggctgagcaggagaatcacttgaatccagtaggcgaaggttgcagtgagctgagactgcaccattgcaccccagcctgggcaatgagagcgaaactccgtctcattcatagatagatagatagatagatagatagatagatagatagatagatagatagatagattagataagatactccatctcattcatagatagatagattagatagatagatagatagatagatagatagatagatagatagagctggctctttgaaagattagtaaaattgcgaaccttctccataattaccttggaacattaaaaacttttcaatcttaacagactttgaaagttctgatctcaggaagagtgggaggtgggtgggtgttgagtgcttaatggatataattcacattgagtgatagatacacgaaaagcccagacttcatcagtatatgttatgtacgtgtaacgaaaccgtacttatatcccttaaatttacacaaataaaatgtgtaaaacaaagttttgagcctctgtggtactatttacgtggtagccaatattgcatagtggttaagaacacagactctacaactaggctgcctaagtttgaatgagtcatatgtgggtcgtatggaacaatgcttgctattttattaatgttaaacagatattaactgtggttattatgaatggtgatgaggagcatggacacgatccattgaagacagctgtagttattctacacagaaaggatatacagttgacccttaaacaacacaggggctactggtgccgatgtctccccccagcagttgaaaatctgcacacaatttttgactccccaaaaactcaatcgctagtagcctactgttgaccagaagccttaccaataacatagttgattaacagatattttgtatgtgatgcattatatactatattcttattataaagtaagctagagaaagggaaatgttaattaaatccaaaggaagagaaaatatacttactgtttattaagtggaagtggatcatcacaaaggtcttcatcctcatcttcacattgagtaggccaaggacgaggtacaggaggggttagtcttactgtctcgggagtagcagaggcagaagaaaatctatgtataattggacttgtgttgtttaggggtcaactatattcttgctgccttgtttctatactgtactgtactaatagaactgggaaagaatatccagtacaccgctgataatccaggacttcctaatacacagtactgctcaattttacatttttggctgttcatcagcaatttttcttttgaatgtatataaaactatacaatcttgttgttacacaaactgcccctttttctagaaatactctcacttgatataaaaagaactgtaaacatcaaaaaacacccacaaataaaggcaaccagaaagatgtttttggaaaaaaagcatttgtaaatgagttagtatccttaagagttcctgcaaatccatgagaaaaccatttataaaccaatgagaaaagggaacaaaggatacaaacacttcctagaaagaagagcatcaaaaagggtcaaatgcataggtacaaatgtaacacaaagtgacaatttacgctttacaaaacaccacaaagcattgttgaaagttttaaacgcctagattggaaagataattcacgttcttggattggaatacttactgttgttaagatggcagtgccccccaaattgatctacagattcaacacattccctctcagaatcccaggaggagtttttgcagaaattgacaagctaatcctgaaattcatatggaaactcaggggactcagaatagctacaacaatcttgaaaaagaagagtaaagttggaagactcacactttccaattacaaaacttactgcaaagctatagtaatcaggacagtgtgatactagcagaagaattgacataaacccatggaatagaattgagagagagaaataaacctgcacaagaaatggtcaattaattttcaacaagggtgtgaagataactaaatggagaattaatggtgttttcaacaaatggtgcaggaataactgataccgacatgcaaaagaatgaagttgagccccttcctctcactgtacacactaactcaaagtgaatcacagacctaagtgtaagagctaaaaccaaaacttttagaagaaaacatagtaataactcttcctgaccttggagtagcacaaaccttagatacaataccaaaagcacaagtgacttttacaaaaacagattaattggacttcatcaaaattaaaactgttgtactcaaaagtgtgctattaggaaagtaaaaagacaacccatagaacgagagagaatatttgcaatcatatatctgatcaggaactcccagaatatatgaagaactcttataactctttcaatgataaaatagcaaaggatttgggtagatatttctccaggtaagatacataaatgtccaataaacacaggaaaagatgctcagcgtcattagctatcagagaaatgcaaatcaaaaccacaagcagataccactttacacccacttggatggctaaaattaaaaaacagagacaaatgtcgcggatgtgaagaaatcagaactctcatacattgatgatgatgggattataagatggtgtagtcactttgaaaaacagcatttcctcagcatttcttgattttaatatagagttaccatatgatttagcaatcccactcctagatacatacccaagagaaatgaaaacatatccatgcaaaaatgtttgtatatgaatattcatagcagtgtgattcatagctacaaagtggaaaccacccgaatgcccatatcccttccataaacagtgtagtccggctgtgcaataaatagtgttcagcaataaaaaagaatgttgatacatggtgcaacatggatgaaacttgagaacaccatgctaagtaagagaagatagctaaaaagactgcactttattccatttctgtgaaatgtccagaatatgcaaatctgtagagaacagtacatcagtggttgccggagctgggggtaggggatgatggagagtgatggctagtggatatgggtttctttcgaagtgatgagaatgtcataaaattagactgaggtgagagttgcacaactctatgaatataccaaaaatcatgaagcacactttaaatgggtgaatttgatggtatatgaattatatcaactaataaaactgctaagaaggaaaaactcttccttctctaaccagtagttgtactcagggatctatccctaaggaaatgtttttattcatcagttcctccaatgtttattaagtgccgctcttctagtgtgtattctttaaggtgctggggatacagcagtgaacaaaatatgtaactaatcagacaattcggttaggaattctgagaatcagacctgaaaaaaatttttaaagagatgttcacaatgttaataaaaagccagaaacacctaaatggtccagtggcaaacaaattatggcatatggtggaatgttacataaccatttaaaatttaagttttcacagaatagtcactgatgtgagaaagtgatatggtaggatgtgaaggatgtaaaatcctgtatatgaaatactatatactgctgtgaaatcaatattatttctttaggtaatggtgctgggttttgactcaagagcccacctattgattgctatttcttttttgtgtttttctgaagtgtctaactctcctagagtaagatacattatctttatgatcctaaagatcatcagcatccatttccctgagttcccattgacactaagcaaaagcactgaactgctgcaagcctcacttttcaatgcttctatcaataggtttgtttcccttgaggttaagagaacaaaaccatggggataatcggatttgctgctaaataaaacgtatttttcacttgtcagaatgagtatggcattgtctaatttgaaagagaagaagaaaactaacagaataagtgtccactctttattagggactgccttttttttctttgtggcgtgtttcgtgtattcaagttagttgtgttttgcttcttttggtatcaacctatcaataagtttcattacatcaagagttaatccttagtgctcattatgtgccaggcatttcctccccacccacgcctccccactttttttagagaccaggtcttgctctgttgcccaggctggaatggagtggagcgatcatagcttactgcagcctcaacctcctggactcaagtgatcctcccacctcagcctcctgagtagctgggactacttgcaccactacacctggctagtgttttatttttatagagacacggtctcgctatgttgcccaggctggtcttgaactgggctcaagcaatccttctgtctcagcttcccaagatgttgggattacaggcattagccaccgtgcttggccaccaggcattttcatccattaccatgtctggttcttctgtgagaccctacatcaactctgtgaggaaggtatcatcatctcttgttcacgatgaaccatttaggtcacatagctggtttgcaccagaatcggaactgcagtacaggtgctgttggtgccggagctgatgtcattgcccagtgtactgtgctgcctgctatgaagctgtgaggtcaaagaggacaaggtcatgcagcaggaggggtttgcagtctaatcaggggatctgggcacacactcacacagacaaagcaaggaatgatacagtcctaaagtatagagtatggaaaactaggaaataacacagtaaagtacttattggtggtcataaacagtaactgaaatcattgaaaagaaaactgaagattataaatggcccttgccaattcccaggaataaatacattctgctgttgtttacttcctctacttcatatcatccctctttacttcccctttaattaatgttagaagatttctgttattaaaaggtaaataaacagttggtatgtgtatgatttagtttccttttttagattgtgtttctttttttggagtctcactctgtcgcccaggctggagtgtagtggcgcattctcggctcactgcagcctctgcctcccaggctcaagcgattctcctgtctcagcctccgaaatagctgggatcacaggcacgagccaccacgcctagctaatttttttttttttttttgtatttttaatagagatggggtttcaccatgttggccaggctggtcttgaactcctgacctcaggtgatcccacccgcctcggcctcccagagtgctgagattacagatgtgagccaccgcgcctggcctagattgtgtttcttgaatctacatgtgttttctgcattatttgtaagctgaggtgtatccacctcatgaccaacatgtcgacatgtgatgatctcttggtaaaatgtctgtactcatctaatctttggttcttgcaggcgacatggctgtatggaatacagataacaagtttactcctggtctgcattcttcagttttttaattccatgattcttggatcactgcttatcagttttaacctttcagtattcattgcaagaaaacttcaggtaggactttttttttgtcctttatcaaagtaaacttttttttaattgcgtggtttattgaaccttattttcacacagcatacaaagggaaatttacaacctgatttgcactaaaaagagcacgtggcattgtgtgctttttcttgtgcatgtggtagcatttctgtttcaagctttctgggtcatccttttattttgacagttatttcttagagaattggaaccttaccttcaatgtggggatcagccaaagatgcttggttgaatgccactgatttaaaattgaagtaaaagagaaaagttattaatttttatgtgtgtgaactcaggagcgagaagagtctcctgcttgtgttgggagcgtgttcattacagtccttcacgttggtggataccctgttatttgatgtagtaatgctactcttttccccatccttccataccatactagttatttttaggtgaattaaaattaactgttttgagaattttgagaatccaaataaataactttagaaataatgggacatttcctagggtattgtcaaatcatgtttgaaaacaatgacttgctcttttagctttatttatataattaaatttcttatatttacataagatatgagtcatttgtttttgcttaaaattacaacatcctgtttcacatatgctagaaacttccgtgtcaagaagccattttgttttccacttttagaagaagaaatcatttttcttattagtcttttgagtgagaattgttatggacaaaggtttttagttgactatcaaaaacaacagttcacagtcatccttttaaccttaattataaatattactcgtatttgaactgttaagatattattatatttaacaatgtataaaattatcaagattataagaaaactattatatgtcaaaaggcacaatgtacttctttttacacccataagtcttttatgtaattgacttgtaactatgcccgtggtgtaggaattaatggataaaagatgtaacagggccaggcgtggtggctcacacctgtaatcccagcgctttgggaggccaaggctggcagatcacgaggtcaggaaattgagaccatgctggctaacatggtgaaaccctgtctctactaaaaatacaaaaacttagccgggtgttgtggcaggcgcctgtagtcccagctactcgggaggctgaggcaggagaatggcatgaacccaggaggcggagcttgcagtgagcggagattgctctgctgccctccagcctgggcagcagagtgagactccgtctcaaaagaaaaagaaaaaaagaaaaagatgtaacagtttgttcagtcagcgtatcctgagtaccttccaaatggcagaccccaatcctcctgtttctaaggtctgaaaaaataattaggaaaaaaaagactaggacacatttcctcatcgtatgaagctcattattaagtgattcatttactactagaaaatcacaaatattaagacagtgtaacctcatgaaaatgagtaggttgtattttccacatatattttccctttatgttatatgagccagtgtttttaaatccttaagtaagctcatcttcagtgtttatgaagttatattaaaacttaagaattaaaacataactcttttaatttctagaaaaatctgaaaactggaagcttccttaataggcttgggaaacttttgttacatttatttatggttttatgtttgacactttttctcaacaacataattaaggtaagttaataaaaatgacatgtttaatgtatttttaattaacttatggcattggagataatttttgaaactttctttttcttttttaataaactaattgttttagagacagggtcttgccgtttcctaggctggccttgaacacctggtctcagatggccctcccaccttagcctcccaagttgccgggactacaagtgtgcaccaccacacctggcttctttgaaacttttaattttaaataaattcttgctttataaagtgtattaacgtgactcaagagttaccagttttacttcaaacaggctcagttttaactttgtcttagtagcaaggattattttgttgattttagtcattaatttctatgtactcttatgtcccaccttgaacttactcaccttttgttatgaaacttttaaaagcttaacttaaaaagcattaaacaaataatttctctaaatttaaaatttttatttttagtaccgtaatatacacgtagctttctgtactgtggtacttaaaaaaaaaagacatgatttttaattgagttcagttaataagtaaagtggccttactatctactttctgctggaaagaagagttgagctcatttttcccaacatttaactgacttatatgcaacaggcctaacagaacaactcatttggtaacgtaggcatccattggttttatgtccagtaggtgctttgctaagatttttacaatgccccaggggctctgcttagtttaacatgctttttaaatgtttttattggcgttttaattttttttcagggtaggctttattaaaggtataattcttggaccttgatatcccatttgtttttatgctagagcaaaactacattggtatcttcagatacttttgcctgtcctagaaggttggtctcaggataggaggcatctgcaaaacaggctccttctccacaagagaactgtggtccttgttcacgtctgttgactatcaaagaaaaaaaagactcttcactcagccagtcactatgtcactatgttctttttttttttttttttttttggacagggtctctcacccagactggaatgcactggtgtggtcatggctcactgcagcctcgatctcctggatttaggtgatcctcccacctcagcctcctgagtagctaggactatgtgtgtataccaccacaccggctaatttttgtattttttgtagagacaaggttttgctgtgttgcccaggctggtcttaaactcctaggctcaagcagtccacctgccttggcctcccaaaggattgtaggcgtgaaccaccatgcccagctgtcagtatgttcttaaactccatacagtcaagtacttatcaataatttatttttaaatttctaaattttttttgctttttttttttgagacaggatctcactgtgccacccaggctggagtacagtggcacgatcttggctcacggcagtcttgacctcctgggctcaagcaatccttccacttcagcctgagtagctgggactacaggtgtgtgccaccgcccctggctaattttcacaatttttgtagagatgggatcttgtcatgttgcccaggctggtctcaaacacctgggctcaaggtatgctcccacttcagcctcccacagtgctaggattacagacacgagctgctgcactcagccaaaagctttttttgagttgatgaataccccatttatcctgatggaattattacacactatatgcctgtgtcaaaatatctcatatactccataaatatatacacctatatgcccacaaaaattaaaaattaaaaagcctattcaaagccaggtgtggtggcttatgcctgtaatcgcagcattttgggaggctgaggtgggaggatcgcctgaggctaggagttcaaaaccatcctgggaaatgtagcaaaatctaaactctactaaaaaaatttttttcaaaacttgagtggagcagccaacatttctggaagagtggccaaagatacacagttcttgcattggcccactctacacattcagtgacctgttcttggattaaaccagtaaagagctgcatccctggaccaccattttttgactccccgaagaataacatctgttgaattgcatttgatgttttgccagtgacctacaacaagaggaagtagagaaaattttccttgaaagtccttgctgtttttgctttacccatgggaaaaaattattttgagtctcagttctaggactgttaagatctcttccgagcaactgttttgttttactcttataaacccgtgagtaacataaatatgttgacctccctgtttgcatttgctgctggaatgcaaaagaccagatttgtggctcatctctaatgaatatattgtgtgtactgaactcaattttagcttcatcttttctccctgtcttcatttttcttctaataaattttttcaccatttatgttattatatatggatttttaagccacaaatttaaaatagaattatatgagttaaaattgtaatcactaatgatgaacactcatatttgtctgtccaccccttcagggttacaactgtcttgaattgtctttgagtgaataagtcttggatcaattgtatccacagaccaaaagccccaaagccagacaggctttgtgggcggtgtatctatttgaggtttcagatcatcgtcttgtcagttttctggtctgaaaacttatgcacactatgcctcagccttctccctctccctgaaaccaaaaaatctcatcttttacctattttgcatatttaacttatgtataagatgttttttgaataaaggattatgctaaaaaggggagtggggtttggaaggagtttggaagtccctgctttggaattcctcagttctgagaactactgtgaacatttactgattttgtacacccacacgctcctgtgaaattggacactgaatatgtaaattcaatgggaagttatcaggaaaccgtgcctaaaggactaatagcaatttttgttttctctttccccgatagaaaattcttaacctgaagtcagatgaacacatatttaaatttctgaaggcaaaatttgggcttggagcaacaaggtataactgaattgaaagtctatgtttgctattttctattgaatcagcagggactttaaaacttaagttgtcattgtgccttcaactattaattgcagactccctctgaggaaagatgcaatgtcatttctttgtcttatattgaatttaatactttgctttccatttgttccctagggattttgatgcaaatctctatctgtgtgaagaagcttttggcctcctgccttttaatacatttggaaggctttcagatactctgcttttttatgcttacatattcgttctgtccatcacagtgattgtagcattcgttgttgcctttcataatctcaggtatggtatatttcagaaatctaatgctctcctttaatgaacttgttccatgttgcagaaaaattgcaaagttgaaagtcagaatatcagacacaagtaatagtattcatcttaaagggggaacatacctcgtttagagtggactacactcccagtagttaggagacaacagagtaatgatcagattgcatgcggtctgggcttaagtcttggcctgcacacttgggaacaaagtgactcttgagccagttacataaccttttgatatgtccatttccttatctttagaatgggaagactaagagtacttactctacaggatatttgagaaataagtaaaaacaacataaagcacttaaaatagtgtctggtgcctagacttcggcaggtacaagccatcgtgaactggtttcattatcactgttgactcataagcctctgttgtgtttccattattagcatcctgtgtttttctcccttcctcctctagctgcttttttgtattgctcttgaaatgtaagagttaattaattattgctcatttgttttcttgcatcttgcttcagggctcataatgttggagtggaccataattattagtatctactaaaagttttgagtaataactgccaattttaaaaaactaagtatatctaccaatctactgaaagaaaaaaatcaggagtatgaaggctttttaaaaacttgtaagaatatctacccatcaagctgctgggggggtttgcattgactcttcgtgttaaactgaaagaaaattaagtgtaagaagttgaagctgctgtcatttgtgaaaacttaatgaagctcacgaggaagccctttttctgtagttaccttgccaattaatgtgctggtgaactgtgattcacagccacgagagagctgtcattaaaatgagtccagagcagttgagaggttttatgatcattaagaatgaaacaacattgaaccatgaaaatatttcattgaacataaactattttactatccttgagaagtgttctttttcatacctaacccaagataaaatttagccctgtgaaaatagatggaaattattctggacagtgtgatttaatatcattccagacatagcaagtgtcaacaggactctggactgcatacaaagcaggaagttcagtgggcctgcagtatcttcctgaaaatgtctgccatgctctgtgtgaatctatgagccatctctggaggctgattgggtatatgatcatagataaaagattttagagcatcttcatctgccagatagggatattaggactttattagaggaaaagcactacatgaaagtaattaaagaatcatagtccagtcatgtcacttaacaagggggatatgttctgagaaatgcatattaggcgattttatcattgtgcgaatatcatacagtatacttacacaaacatagatagtatggcctactacacacctaggttatgtggtataacctactgcatctaggctgcaaacctggacagcaagttactatgtttaatactgtaggcagttgtaacacaatggtaagtatttgtgtaactaaatatatctaaacatagaataggtacagtaaaaatataaaggccaggtatggtgggcctgtaatcccagtgctttgggaggttgagaaggattgcttaaggctaggagttctagaccagcctgggcaacatagcaagaccgcatctctacggaaaaaaaaaagaaaaagaaaaattagccaggcacgatggtgcaaacctgtagtgctaacaagtcgggaggctaaggcgggaggatcacttgagcccaggcgtttgaggtttcagtgaactataattgcaccattgcactctaccctgggtaacagagtgagaccctatctctatttttaaaaaatactgtaataaaagattaaacattgtatacctatatagggcagttttcataaatggagcttgcaggactggaagtttttctgtgtgagcctgtgagtgaatgtgaaggcctaggatgttaccatacactattgtagactttataaacactgtgcacttaggctacagtaaatctatttaaaaaacaaagtgattgtgctatgaccttataatggctatgatgtcactaggcaataggaatttttcagctccattataatcttacgaatccactgtggtatgtgcgatctgttgttggccaaaatgttatgtggcacgtgactgtctaaatgtgaattaacttttaaataagggccttttgtcagtgccaagtatttaaagtatttctacctttttagtactaggaaggatgatactatgacttgttttgttttgttttgttttgttttgttttgttttgttttgaaatgcatctcgctcttgcctgggctggagtgcagtggtgcaatctcggctcactgcaacctctgccttccgggttcaggcaattctcctgcctcagcctcctaagtagctgggattacaggcatgcacaaccacccctagctaatttttgtatttttagtagaaacagggtttcaccatgttggccaggctggtgttgaactcctgacctcaagtgatctgcctgcctcagcctcccaaaatgttgggatgacaggcatgagccactgcaccctgccagatactatgacttttatgtagacatctgcattagtgtgaggggtacatctgaaaggggcatggtgttccctgcctcagcctcccaaagtgttgggatgacaggcatgagccactgcaccctgccagatactatgacttttatgtagacatctgcattagtgtgaggggtacatctgaaaggggcatggtgttctgtgttcatggaattaatcagagccttccagcttggctgggctatgggggaggtactgcagacttctcttaggtatctagagaggataagagcagatactccccttgtctgttttatttttatttacttttcacaccttgccctgttgatggatattcttatttggagtatcctttttgtaccaatatggaaaccagtgtttgggttgtaatatttacttttaagtaaagattccaattgtgaattaccaatggtgagaactgccttagagtatccttttaattttcgtatgtatttatggtaggaaaaaaaggatttctgggaaataaaaaaagtctctagttacatagagaagcatcgtatgtgcccagttctattgggtatgtatgaagggatcagtagaccttcatgaaagtttcatctttaactagtagcctttactgttgttttcttttcccctcgacaacaaattgtgcaacatctaaagtcactgatcagtcttaacatcactgaagtggagacagccaggcagtgtgtgcttcccggtgtaatgtgatgtggaatagagccgtcctgttttctgtggaaatatgtttcaagtccctcagtggatgcctgaaacctcggatggtttcacaccctttctatactatgtttttttcctatacatatatccctgtgataaagtttaatttataaattaatcatggtaagagaataacaataataataaaatacaacaattatagcaacatgccagcatcacttctcttgcactttggggccttagttatgtaagataagggctgtttgaacacaaacaatacagggacatttaaatgtatcttactttattagtagtttagtagctgaatgtatctgcttgtctgtctcgggtaggtgggtagactatacagcgtggaaacacaggaccaagggatgatgatctgagtctcaggtgggacagacagggatggagagatttcatcatgcaacacagaatagcatgtaattcaaaactatgaatggtttatttctggaattttcaatttaatattttcggacagcagtttcctcaataacaaaccactgaaagtgaatccaccgataagaggggactactgtgcatcataaccccgtgaagtgttcttgccaaaaaaatgaacttgtgtctgataaacctctagatctaattacaagtttacaagaagcatgaaacgtataaccaccactgtgagccacacctgggagacgggaacagcttcaggacatatgttctctattcttccacaaacaaatggcctgttttttaaaaaaaggagatacttttatagatcaaaagatatttaaagatatatattagtgaaatgcaacatgcagttcttagatcctgattcagagaaacctgaaaaaagcaattgatgcaaacagggaaaatagaacatgaactaggtattagatgatgttaaggaattattgttacttttattgggtgtaataattttaatgtagccgtatttggtaaaagtcatcttttggatatcaggaggtattggtaggttaaaaatgtgatttttgaggggtcataaaggaactgaattccaagttaatggatgtgtgttttgcttttgcttatttgtaaaaatttgaaaaatactcataataactggtaaaacatcttttaaaaatctctttcaatttcagcaattccaaaaaatttgagtttttttttttgcattctcttttaatttaaagaattgaagcactttaaatttttacttcaaagctgctgtgaaatttcagtttttctcattattaatgcatttatattgttacactttagcctcataaattcaaaattgatcaatgcgaattcatttcatcttatggaaataatcaatttctgaatacataaaggcatacatttcttgtatcttcttcttttacaaagatctaactaaaattatgtttccagcttaaattttgtatgttgctgttttactcagtgattctacaaatcaacaatccgtgggtaaaatggaaaaaggcacagttgacctgaaaccagaaactgcctacaacttaatacataccattctgtttggattcttggcattgagtacaatgaggtatttttgtcttacctgtttgtttactttttatttgatcactcttgatgttacttagcaatataatttggaaagtgacaatcatcttcattaatgatcatggttcccataaaatcatccttatatcctatcttctctcagtataaaatactcaacatcagtttttacaattaattacaaacacgcctctatgttttactcaaagcatagtcttgaaaaggcagtggagttaaacaacgaacccttcggcaaatggcatctgcatagttttaagtaagattttgccgtcatagactgtaaagctgcctttataggtgtctcagaatccaggtttatatacaactagtacttctgacttgcgcctgtgtctgttcttgcagaatgaagtacctctggacgtcacacatgtgtgtgttcgcatcattcggcctatgtagccctgaaatatgggagttacttctgaagtcagtccatctttataacccaaagagggtcagtgtcatccctttttccatctccttttatgacttgcagtatttctttcataccacttctttttttgtttttcagtagctgtgagataaaatggatactgaaattgaagctgaaaatacataattgatatattaagattttatagggaattattttaaaataattttattttaaaaaattacttttttctcagactataagttagatatgttcattatacagaatttggaaatacaaaaaaaagcacaaaaggggaattaaaattaccaataatccccttgtccggaattataactgttgttattataatgtattttcataaagataattatttatatatgtatgacaatttttcagtagcctataaatgcagttttgaattgttctactccataaattcactaggtggcaatatagtagaagctgcagatatcttacaaatgattagaatcctagtatcgactcagttattctgcatattggagacttgtgctccattaaattatatttctggtaattttttaaggcatatatttacaaagcaaaactgtaaggcagaagtgtttaaaaaagccgggcacagtggctcactcctataatcctagctgctcaggaggctgagacaggaaaatcacttgagcccaagaattccaggccagcctaggcaaacatagcaagaccctgtctctcaaaaaagaaaaggttcaaaatacttataatctaaataatgtctttcttatatagatatgtataatgcgatattcagtaccgatattaatactgctgtatctatgctataaggtaagactgattttcctcattcttgtcattcatgtatttagcagaataattgctttgattcaatatattttgtgtattatttggcaaatagagtggtttgtgaaggttataaatacctccttagcttcttactgaaggtgacattgatgggaaaatggatctttttcccaaatagttttaacaagtaaaaacatgatagcgaaaactactatagcatttaataattctaattaattttgatttagactcttaatattcagctgatgcaaattctgaaaataaggtgttttcagacctattttgaaatgaaagtaggaaaattattttcccattacctgatttatatagactaagagatttttaaatgtatcttactttaagctccatattttattagatgcttatcttcataagagaattagacacataaataaacacagcctaaggctaggctttttaaaatctgttcttcagtatcaataggaagtatctggatttttcatattctcatttgactagtttctgaaacagcatgaactgccctttaattcagagaatttcttatcagagacaatgatcattggtcaggttgactgtggctttttgtcacatctttgacattggcagtcttgaatcatcactagggcagatagcacagactgttttatccaattgagcttctgccctctctttttaaagaacctaacatattaagtttatattttttttcctttaaattttactttaagttaaaacgacggatttcaaactctactgtgtagaacccctgatttgggagggtggctaaaagcaggggtgatgggacctcccgcagagaggatcagctagagcagctcagctttggggtttatttgcttatattttcatgtaggattttgtgaaccaaaggtttcaggctaaagaaaatattgctaaatactatattgtaaatatttcaaaaaaatgtgttctgttatgagcctgtctatcaaaacatttaccattagcaaaactctgtgctaactcctagatattaaaaaacacacaaatagatttatgcctccccacctctgggaattttattgctctaatgcgaataactgaaacttactaaaaacatctagacacgaacagttaaggattaaacagtatatgttactgaggagtcctgtcagtttacctttacacaatgattcagtggattaaagcaccctcctcacagaaaagataaagctcatgaatgtttttctcaccactgaagatgtaccgaacaataaccatctttcatactgcccgtgtgcatgtaggttcagttcttttatgtctcagctatctattgaaattttactgatttttttaagctatttgaggactgaggtgttttgttcgtaataaaattgaggaaggacattgtataagaagtaaactgtcctagggagcattgattcttgaagcgtggtcctcagataaacagcatcagcgtctcttgggatcctgtaaacatgcatgtgtttgggtcccactccagacctaccgaatcagaagcctgggagtccagtacagaaataggcatttaaccagccccccagttttaagaaccccctgctgtagcggtcacagggtttctcagcagtggcacattgacacttgggccagagaattctttgccgctgggggcgggggcggtcctgtgtgctgtaggctgctctgcggcagcttcagcctctgcccgctcattgaagcacgtctcccctggctacaaccaaaaatgtcaccagacattgccaaatgccctggggctggggctaggggcacaatgtctccccttactcatcttgaaaaccactgctataaaagaactgggacagctaaagaagccatcatctccaggaaatcctgttgcaggttttccctgaataagggagttagtatcctgaggaatcctccaaaagactgttggcctagtctctcttgatacaggagtttaggagaaatcctaatgcattcagctttcactgtataaaatagttcagatatttcatctccacaaaacttacataaaatcacagagaaaattaagatggtatgggtatgaggggttaccctgaaactgaatctgttttccaactattccagctcttacagacttacctgtaagtaatgtgaattcatatatttcaaagcctgatttcagttttacattgcaattgtagttagagtttcaaaatttcttgttcatactaccaattttgctgtatttctctttagtataagcatattaaaagggaaaaaagcatgtactagcctgcactccgaagtcaagactttagtaaaattaggacgttggtcttgattaacttaattggattgctgaaatctctactgctgattggtaaaaacggcagttagttaattcagcactttcatattgttaaaggagtttgccgcaaaattctcactagcttttaacattttcagaattaataacagtaactttcaaactagaaaaatatctaatattcattgagttcacagatttcaaatatgtttatactgtaagaattagagcatttcattaaaaagttggtattctattggttatcaaattagtaaggaaacatagatcattgaaatattacaaaggcatcatttaatcagtaatttttactacatctcttccaaaaactagaaccagaagtcctgacacctgatttcccatcactagcaattttcctgattcacccacccaggagacaagatttgaatgagcagtaaaaatggccaaagatgagatgaccaaaaaaacagtgataggtctcaaacacagccagagatcaatcaggtgctgctttgattctactagtggttcttaaataaaagtattatattttctacgtcagtggagcatacatacattgtcattggtcttctatgctaatatgtgaagtgaattctacctttgaccttagaatgtatatagatatgatcaagtctttttagtcaactgtcatttgataaaaacaattaagatttagttaattgttgaattaaatggacttaagatattagataagtgggtaattcagagagtaatttttacattttatttagaaaaccttaagtactcaagttgaccaggaggcaccaagtggtataaatacagccagatgtaccagatattcctggagagccctacatttaaatattattctctttcattgtaccagcaattatattaatatatgtcaaaccatttgaccagatttctagtacaaaaatacaatcatgctattttgaaatgaaaagggggctggatttggagccagggtccaggttgtagctctgccgcttgtgacttggtcaagtcagatacctctctgagcctcagtttccacacttctaaatgaaaaataaatcccagtgggtgatgctgcctgttgcgtcatccatgtcatgggttattgtgaggataaaacaaggccgtattctaaagcatttttgcagcagtaaaatggctctgtcttctacaggatacattctacttttaggggtaaattgcatggtattagttaattacatattcctaacggattgtgaactttctcatggttggcattcttgtcatgtcaaaataatgttttgccaggtattatcatcacatacaatagcatttctattggagcaaaataaaaagctcattttttaaagttggcgatacctcacatcctaattagtttcagctgaagataatttcagaaacttcccaggcgctagttcccttgtattaggagggttgctgcagaggtgaaatagttgtatattccagtagctatgtttatttagttcacacattatatgcagtttatctttttttcatttaatcttagtgatagttgtgggtgtaggggtggattttgtttttgttttgttttgtttttaatttcagttctggccaggaatgatggatgaactctccgagttgagagaattctatgatccagatacagtggagctgatgaactggattaagtaagaggattttttttaacttttaaaattttaagtgccttttaagagtcactatagaccacatttcgttttgggggttttttgtttgtttctgaatctaattacgaagaaacattcgtccttactagatttttctttaaaactccatatttgaaaataatgtctttctatttaagaaatattctctccagctatatctcatgaagaaaggaaaatacccatttggagaggaaaaccgattcaataaataaatttcaaaccactgacagaaatggcaataaaagtttataatatctgttgaaacttaaaatttgatgtctctgccaattttatgtttattattttcattttaataccattctgattttccactaatggtgacacttgaaagtattctttctggccgggctcaatggctcacgcctgtaatcccagcactttgggaggctgaggtgggctgatcacccgaggtcaggagttcaagactagcctggccaacatgatgaaaccccgtctgtctctactaaaaatacaaaaattagccaggcatggtggcaggtgcctcctagctactcaggaggctgaggcaggaaaatcacttgaactcgggaggtagaggttgcagtgagtcaagatcgcgctactacacttcatcctgggcgacagagcaagactctctctaaaaaaaaaaaaaaagaaagaaaaaagaaaaaatattctttccttgttttttaaattatactgtaaactccagttaagtagaggctcatgacagctcagtgcggatttcatgttaactcatcatattgccaaagcctaggaccagagaaaattttagatacaaaacctggaactttccgtcttgaatatcataatgctttagtgtcctattggctcttatttctgccggcactttgttgttttgcctcagcattcagcatcagaatgaaatttgtgtatttcaaagctttattaacaaaacctgcctcccaccagcaaaaataaacttttctacccagagcaccattcctatgccctggaacactgtatttccctacttttaaccagaaagcagcagtgtaattattcacatgtaaatagaggctgtgcatcacatgtggtgccttctgaaagcattggctggattgtctgcgtcccatggctaatgcttactcaccagtacaggtcagccctgcgtgtctgcagagatggtcagtgcttgacagctgaggcctccctagggcaacgcatggatctcatagagatttgtctaaaacatacacatggctttggtcctaatgtcggactgggtttgactagatgcagtgagtataatttttcacatatttctggtgctgagagcactaagcgttgctttgtctttatttaattttaaatcatgccagacgattacagagtaaataattccttcagtatttattatgtacaaggaaagagagttattcgtgtaaaggaaagctaattacttttgcattaactatagtcagctggaaatttatgacgtacatctgaagttgaggctgatattttctgttttcaggactatgctgttgaaatcaatgctgaggacccctgctttctggtagcatgctgaaggtggtgggtcttccggatctccttagattagcaccataaacaccccagtctttcaggaattaattataaagtcattaaaaatgtattctagcagagccccaggttatcttcggcagtctcagactagatatatttatttgtagtgcctttatttttatgcttttccccacagaaaattaaaataacatttctggctctgaaaaactggatgagagatgattccaggtgtaaagaagagaatacaagtgtcctatttccctcgtttgggaggtgatgttcactcctcagaccctccttttgctaacagctcgtctccctgtagtgcttttgtagtagacatattcctttggcttttttttttttttttttttttgtaattctcagcaactgaaggatttgccttgttccaaaaaatttgttctattgtgatctagtctcagctttttcccctaaaattcttcaaatctaaataatatttttgtaaaactagctgcttggtatgtttgcaaaataagcataagtggtgatgaatgtatgccaaaatagggtctatgtagacatcaaatatgtttgtttaaatcaacactcaaatccacactggcctgtaggtgtggattccaaactcaagtgactgccttaatattcttttaatctgccctgatttcttctgtttttgaaacgtaaaatatgaccttcaagtttcacctcactgctttgattagtcacacggtatccatgttattagcaagtatgagttgtgctggagaaaaggctgcggcctaaggactctttcagacgcatgggctgtgtctgaaagagtcccaagacgcctggcagagaaccagcactgtccctgagggctgcctctgtcctccccagcctgtcttcctgtctgccctgttcccagacagtcaaagcagacacactcaaatgtctgtcttctgcccatgcaatcatcacggcatctatcggacaggggcacagcctccattaggggagggatggctgtccttgggatgaatcacaactagagaaatagtggcctgtggaaaccctggggacacctcaagtgaccctccattttggcacagggcaccccttacgtgacgtgttgaaaagaagcttatccatcctcttcatcactcacacacctggaagtgtcccgccccgtgtccttgctgctggagtaagccacaccccacatgaggcattacgttgtgctcctggacacagggcttccgcttggagattcaggctttccaagtattctcagagggcttctctgctttaagggtaaattgaaagatgtggttgcctcagtgggagttggttcttttcttttttataggctgaagagatatcctcaagggaaaataaagggccttacctgagggtgacacttaacatgagaagggtcatacccaagggattggattcctgtgaagactcttaaagccttaactaatttataaagttatttcacatctgaagttgtgcacttattaatatagttcagcagatgttcatcgagccccagctgtgtatgggcaccgtgtgaagtgtgtggatgcaggtggcgctccactgcagctgcctttcactggagtaaccgctgggcctcgcctcagcacaattgccctcattcttttctcccgaattctcaccctcgactccattttaagatcttcagtggcttagcaagttcagtgggaaagttttttttagaattctaatttttagtaatagaaaatgttttatgctttcctatctttagctcctaaaaggagtagagattgaagcttcagtatgaaaccaacagtgtttagggattaagttgctcttttttacaaggatggtgtgacatttgacatgttgttaaagtcagggccccaggctgcggtagccccagccgccttccctaagagctgggaggcatgtccagccttccacaccccagcctttgtgcattcacctgcctgctgctctccacgctacaccgatgcattgcatgccttgttttcaagcagaattaaatgcatatattcatatttacccttctctgctgataaggtttcctggatacaaagattaaaaacttggatttttttttttttttttgccttctggtgtctctttcagcaaaagtcaggcggtagttttaaaggttttctgtgcaattagaaagcacgtttacctcagcaaggctgaatgcaaccacaatctgtggtttctaccttgttcctttgtgtccttgaatgtttcatttttcgttcctgaaaattttcttctgacattttgcaaataagataggcatatctatatatttgcatattttgagggatgacattttagctacttcactttaggagattttcactggaaatagtctctttccagtaatgaaacccgtgtgtgcagtattttctcaatgggtctgaaaaaatggaccaactttctttcacatttaaccaaagcagaaagttcgtgtatattttaaatatgatgtaggctaagttcagaccttaaatgcctataagcctcttttctatttaatgaatcattttgtagtatttgcataattctataaatttttgaagtgtagataaagcaaatgttcacacattatattataatgctcagtttccccattagttcaacagcaattaacttgttgaagcttagagcttcaaaaataaatgagattatttgttcaaaatgccatcaggtcttcctggaatgacatttaaattatataatgtaaatccatttgacctgtgagtccttgtcattatttagtgacatttcttacagaacaaattgtgtgcaggttgggcagcctgctatggagcttggcagagagctataaaaacaaattatcctttcattttatacatcatttgttcaaacatttgtaaaaattgctttgtttttctataatagagaaatgtcattcagtggttaaaagcacattagctattttagatacagaccacagactgtatcaggcaagagtgtctgtgaaggaagagcacccagcattatgtccatcactgtgcatgttttcagctaaggacaacggatcccttctccctttgcctgctaaatttaccacaaaatagaaaggacagtgaatataagtatctttttaagtttagaaatgtgtgattgtttgtttctcattttgttccactttgcttgtagcttttcctttggcatttgccttacgggtagagtgaagtattggaagtagcagtgatatttcccaggtttaccacggagctggcgtatgagacaaagccacatggcatggagggaagaagcatcatccctactgtcctcagaagtcagtcattttcaaataagtgttatttttggttttattttatttattttttgagatggaatctctgtcgcccaggctgtagtgcagtggcgtgatctcggctcactgcaaccttcacctcgtgggttcaagcgattctcctgcctcagcctcccaggtagtgggactacaggcaggcgccaccacacctggctaatttgtgtatttttggtagagatggagtttcaccatgttggccaggctggtctcgaactcctgacctcaagcaatctacccacctcagcctcccaaagtgttgagattacaggcgtgagccactgcacccagccagaagtattatttttaattcatcttataggcatgaggatatatgtattttactgctttaaaataaagccaagtcctcagtgaaagagtatgttaacaatccagatgattgtggcactaacacattaaatagattacacttcttttaaactttctgactttttgctaataaggccagacattaagacagtcacaacttaatgagcttcattccattttttctttcattcccctgagcagccatgtgtcactcgctctgctggtgatggccctgctgctgccttggggctgcacctgctaggggccggggatgggagccactcaagagctcttagagcctgctgaggagagagcatcttcagtgactgctgtttcatttccagcttagctgaaggcttgcagtaagcattagtaaatacgtgatacactaggctcactacagcactgggttattttgaagtgtttgtctgtaatgggagctgttaagtaagcttttttctttttttttgagttggagttttgctctgttgcccaggctggagtgcagtggcacgatcttggctcactgcaacttatgcctcccgggttcaagtgattctccctcctcagcctcctgagtagctggcattacaggcacccaccaccacgcctggctaagttttgtatttttagtagagacaggtttcaccatattggccaggctggtctcaggctcctgacctcaagtgatctccccacctggccgtccaaagtgctgggattacagacatgagccaccacacctggtctaagtaagcttcttgaagacaggttgtcataccatgtttgccagcccagcacgtaatagaccctcagcaatattttttgaataaagaacgttataactccctagagggcagtttaggactttgggcatttaagcctttgtgaactctgtaattcatccaagggctatgattatagtccaggaggcaggctgaaaccttaatcattagctgtggctggataacaaggcctgtcatctctgctgtaattataaactgcatgctactatagctttgtgcatcttcttggtgctgaagctgcacagagattcctattatacattcaaaacggtgatggtgagatagtcttgtgattggaatggatgttggaagctcagctgccgggttcgtcttttgtgtagaaggccagcttggcactgttcaggcagtgagactacaaaccaggatcattcgcctctgatagctctcgcctccacctcctgctctgccaggcgtggaaaccagactcatcatgttctctctgcatcctaaatctgtctagttcagaggaccaaagacagccactttttggcatgggtgtgtcaagttatcgtatcgttgattgctgtggaatggctcatgccagttgagagtattcaaaggaaagaagcctggcttggaaaaatggtggcactttaaaaaactaatatttgttcatacttgtttcctttagcaattacactctaggtaagggtagcacagtacacaaggcccagagtaagtgtttagtaagtgtcagttgaattaaactgaatttcagtaaaacctttcactaaggaattctgtgcaccttcacgttttcattgaaaccctcttattcctctgaccatgtgggacagaatgtgagagagtccctgtaaattgttgatacggggaacagagctaacatctatttgttcttgttcctgggtctgtcagaatgacaagctctcaagtgcagccaagctcatgtgaaacttttttcctgctggaatctgcattctagactctggcatgggagaggggatgcatattatgtgtcattatgtatgctcattgtcattccagccactttttttcctcacttaagaacgcttattggaatgcaagtgaatgagagtgtcattgttagaaagaaaatcttgaatttttcaaaagtaaactatttgtaaatgtcacaacttgaattgtgggatgtcttgcttgtagacatccaaggcctctgttggatggcattcacgctggagtcttagcgctgagttggaataaataaaacatcctggtgggatgtatgaatgtgatgaggcttctcttagaaaccgcagcaccagagctagttgcgtgccctgctccaaaaccatggagaacagcctgccatggctttttctgcagaggatgttgaattttaatgattttaaataaactcctcataaccatcttcctcattttagttcagtccagcaggcacagactcctctcaatgcaagaaggataaacgcagcccgcagtgtcctcagtgggcctctgtgggaaattctgcactcaggagaatccccagaagagagctcttagggcctcctgagaaattaactccttgaccgcttacaagtgactctcaggtttccaaaaaaaaaaaaaaaaaaaagaggaaaggaattaaatcagctactaagattccttttttccagggaggaaaaaggaaaaatgcttttcctatattctgggagtcttttcttggtccctagtccctgcccctcacacccctggaagacagaaaatcgtagcgtggtgggaactggaaagtgagtttgtgccttagtattagggtgccccgtgttccttaaactgcatatagtttctcataatcaggaccaaaggtatatgtaaaataattgcgttttcacatcagaagtatttgtgtatcccccatattaagtaataagatattggctatttcagaatcttgtttccatgttttgttgttgttgttgttgttaattctgtttttatttatggtggtatctgtgatttttttccttattgcttttttaagcaaaaacccttggaactgactcatgatcacctgcagtttctggcttgatgatttgttacatgttgctctaggtagctcttttgttaagttcaatacgcaaagcagtggcagtcttttaggttatttttgttagactctgcccctctggaacaatagcaggagaggattgtgggtcttggcctagaagcctggactcaagagctacactgcctgccttctaagacaattccttataaaagtaaacctagcaaaacagtaagaagtttccccaccgttattctggtgaacagtcaaaatcatacaaaacattgttgtaaaaaacatggggctggtgcaaaagtaactgaggtttttgccattgaaagtaatggcaaaaaccgcaattacttttgcactcaatagtttgagtacaaatcaaaaccgaagcaaactcccgttttttttccctgactcgtaacacttggtaacatagctggattcttctgaaaaagtttgatattgtcttctttgttgtctttaaggatctcttaacagtggggttaattcagactctaaaatctttcagctctaacactccaagaaaggctgtgtttgcgggaagcatgcagttgctggccggagtcaagctgtgcacgggaaggaccctaaccaaccacccgcactatgaagacagcagcctgagagagcggaccagagcggtgaggctccccagtgcctcccctcgcttcttgtgggccagctatgggctgcgtgtccctatgtgtggtaaagatggggctgaatgctgcaccctccagcattaggttaggaggatgaattagtctgttttcacgctactgataaaggcatacctgacactgggcaatttacagaagaaagagaggtttaattgacttacagttccacatggctggggaggcctcacaatcatggcagaaggcaaggaagagcaagtcatgtcatacatgggtggcagcaagcaaaaagagagcttgtgcagggaaactcccccttataaaaccatcagatctcatgagatgtattcactaccacgagaacagcacgggaaagacttgcccccatgattcagttacctcccaccaggtccctaccacatcatgtgggacttcaagatgtgatttgggtggggacacagccaaaccatatcagaggggaaatcagaacgtaagtgcacagggctcgcatctcctggtccaggacctctgcctgcccatatccactaaggacgtgccattagaccacaggtcctccccaggtcgggacctctgcctgcccatatccactaaggacgtgaggttaggccacaggtcctccccagggaagaaccgagaagacacacgccttgagatgtgcagaagagcgcatttgggagcaaagcttttggattagggaggggaaggaaaaggcgttgaggcatactggtcacgtttcttatggacctttctgaagtctggggtttttgttttttaatagataataatacagtctcatagttcaaaattcagaacatacaaaaggaaatatggtgaaaagtgcctctcccattattgcagttcttagttcccctcctaggaggcagataatgttagcagtttcttgtgtctccttccacaggtatttcacgcatatacaaatatgcggggagggtggtgcccctttctccatttttacagaagaagtggcattctacattctgcttcttcggcatttaatgtgttttggaaaacattctatattcagtatattaacagcttccttcctatttttaaagctgcttaatattttacatggatgtggcatattttatttagccatttctgctgtttccctgtcttttgtgattatatgaacaatgctgcagataaacttgtctgcacatcactctttccaggcacggtgtctgtctgtacagcagattcttggatggggaagtgctgggtcagggttgttgacatctgtagtgtagatcgagagatgttatcaagtcctctctctacaggttgtatctgtttacattcaagtcagcagtgcaggaaggtgcctgtgttccttcatcctcaccagtcaggtttcaaactcataaatgtttcctaatgtcacttttttcatgttggcggttgaaaagttgttgaaaaagtcttgttttgaggtgagatttgactagcctaaaagcagatgatttttactaatctcctgtcttgtataagaatcatttgaattcagactcctgctaaaataggaattttttgatgggctgaagtgttccagatagttccaaattaactaggaggatgcaggaaaggggctccctggctttccaggcaccaggttcatcaggggtggcctctactgcttggactggagactgcagaaaagacaggtcgagtgcacagaacgtcctgggcatctcctttcctgtctcagtactagggttaggccccacacactgacatcctcaaggccctacggctcttcatcaggaccctggaacccttggaatgccttcagcctgagaccttgtgctggactgtaggacaacacagttgtcacagtaacagcatcctacctccctaccatttcacccatccatgtggacacatcaagttagaccctcaagcccaaatcagaaatctagcactcgaaatcagggtgcaacaaaggaggcagtgcctctcttcatgaacccccacattcaacacctcacacagcctgtttccattccagccccagaatctgggacgctcagtttgcatccatccactgagggtgtgtggcactggtatgaacgtgaagggggcctcctgtggcgttgcccacggtgtgctgcaagtggctctcacccctaggatggacgagagggagaggagcagtggggtctctcaattagctgagatgcggagtagcaggtaaagcagccaatgctgccccagcctaggagcagagaccctacagggatccttctccccacctaccagtttcagaagctggggctctgccttattgggacgtgtgtccctcagactgtcccatcacccttaatgggccattttagtctgggggtcccctttttaaaggtagagactgtgtcttatttactcagccctgtcatttaccttgggaaagcagtcttagaattggtgcctactgatgaatatagtcctgacttgaagtaatacattctgaatccagatgtgttcttcctggctcactctcttcccaaggccgagcactcacagcgttctgggaacttccacgcacacactccaggcctgcaaatgagcgagtgcagcgtggcctgggctggagagagcaccttgggtgttaggtcttagactcagccctgtggaaggttacatcacatagttaactccctggcagtcaagtagcatttgccacattgcatttttatgtctttttgaaggtttatcagatatatgccaagagggcaccagaggaagtgcatgccctcctaaggtccttcggcactgactacgtaatcctggaagacagcatctgctacgagcggaggcaccgccggggctgccgactccgggacctgctggacattgccaacggccacgtgagcatgctgcctctccctgtgtgggggtctcctggaggggcgggactctgatttgaatcctaagaatgtgaatctttttatccttaatgtctagttgaattacgctacgaatcaagtatttgctttttctcttgcttcctacagaagccctctcttggcactttagtgactgccaccggggctgggcaagggagaggtgagaggggagccctgggtccccagtgtcacaccaaacagagcagctctgccttcagctcatttgtatgatggggctctgcataaaatgtatctgtgaaggattttgctgctataaacaaaacctcagcctttaaacccactgctccaacgcttcgtattggctagctgctgcatggcagggatggtggggccctcctgccctccggtctaggtggtggattccccctacccctcctgccctctcctactgagtgtcctgtgtccactggtgtgtttccacaggccggctttcagaggctaagttgcactccagagcagaaaagcagcaagccgcttctcccttctcccttctgaggaaagtgttcttggagctatgccaggtctcagtagagcaaacagattttcaccctttagaggtgtgatgtgtgctgtaattaatggtatgaaagccaatagatatttgtaaacaagttggacaaagtgacaaacctagcctaaatttgaaaaaaaaaaatcttgactgtacagaatttgagattcagatttttgcccgaggagaatcatagttcataactgtcttgagttcagaggtggtacagaccagagacatccatttaaattttgatttgagcgtgactttttcagttatttatttatttatttatttatttttagagacagggtctcactctgtcactcagactggaatgcagtggcgtgatcttggcttactgcagcctcaaccttccaggctcaagtgatcctcccacttcagcctcccaagtagctgggaccacaggcatacatcaccatacccagctaattttgtttattttttgtaaagatggagtctggctatgttgcccagatgagtctcagactcctgatccaagcgatcctcctgcctcagcctcccaaagtgctgggatttcaggcatgagccaccacgcctggcctaaatgtgactttttctgatgagttagagagctttctctgatcactgtagttctctgtatttcatttctatgagagagacagtatagtatgttcctgagagcaagcagacctgagttctagttctggctttcccgttaatgggatcatcgtgtgacgctgcactctccttctcagccttggtctgcacttctgaagggggaaaaggatggccctgatgatctccaggtgcccatggacattgaaataatataatttaatttcactcacataccattcttaaacccaatacccattcctgctcctactgtcttttgtaaatagaattttccccccaaattgtatttgggtttgttttggttttagatgatggatggcccaggagagaatgatcctgatttgaaacctgcagaccaccctcgcttctgtgaagagatcaaaagaaacctgcctccctacgtggcctacttcaccagagtgttccagaacaaaaccttccacgtttacaagctgtccagaaacaagtagcgcagatttctgcccagtgtctatttttgatacggagaaactgcatcatgatgaaactcaatagatgacgtttcctatgtaagtaggtagcccaaaccttcaagctgtgatatgagtaagttctacagatgtttacacaagtgttgccatctttgaaagcatcttctacaagcagaagtctttttcgttgtgtgtctatctttctcattaatgttctttagcctaaatgttaacaactttctaagagtgacctagaattatgttgttggagagaatgatgtgtgttccatggatacctggataggcacataacatgttggaagatgagcacctgctcaggatttgaaatacgtttaattttcaggtgacttaagacagctatgattgaatcaactagagatgatgatcgacttatttaatatgatttcactggtgaagaccaattggtagctttttaaaaagcactttagtgtcctgttttaccttaaaatgttataatattttccagttgtcatgctgtcaacattaacaaaaaaaatcatgttaaggctttgtatcaaacattttgttacactctgtctgaaatgtaatgtggagtacttcagcagtatgtgtcatgtattgtgtgtgtctgtgtgtgtgcatgtgcacacatgtgttttaatgctgggcacagaaaagtgttacaagttccatatcgtaagtccttaaaggggcagaaatatatgtagccaagtagaatttattacattttagtgttattattttaaaacttactgatactctttaacctctcctgcagtaatagttttgctttatttcttactcatttcaatttattgggtttgcaaaattttgtaaactttttgtgtttttagcctttgtattttttacagcctagaatcttgcaaagtctgaatattttttaaatgttctatcttaactagttcactaatacagtatttttagcagacagcattttcagacagcattttcataccaagtttgacttgtggtctccaatcttactgggaaggccctggtagtgtaattcttttccttattaaaaggtaaccaagtgcctctaagtcatgcttatttgtaaacaacaaagaagagtatatgtacctgctcaaaatttttttgataatcgcttatataattaatttctaatgatgaggacatgtaaaagttgccagtaagaacatagtatgcatttaattaaatcaagatggctaatggaattaactttctcccctgttcttgccaggtggaaatgatttaagcatttctccttgcagttgtattgaagtaaattaccataggcatcaagatggctgcatcacattttcaaatgattttatattcagttgctacttataaagcagcattcaaaaagtcttttacactgtcatgttggacacaagcagactcagcttttatcaaaacttgtttaaataaaaaattgacagtagctgggttattaaattatgcaactgaaactcctgaattatatcttttctgtatcccttaataagattggagaccactgccgtttaggataatacaataataaaacgttttaatcagtactaaaactttaattaagccaataatgatgcatgcctgttgtagctgacagcatgggtcagtacatccttcagcgagtgccttactctaattgaaaccaagcacacgtaaggtacaatatgttagactctgtgattttgttttcaaaatcctctgttatggctatatttaaatttattttaaatattcctgtatgtattcatctaagcatttgggcatttggagtcttaatatacaagaaacacgtacttaaatttttatgcttatcaccgcaatgatggcaaacagtgattttttttttcatagtttaggtgtcattgttgccagcacctttagtgctcagtcttcagtgaaaaatataaagtgccaaaaaaatcttgcaagacagaatccatacttaacactctttccaagacactgtgaccatgtacagtagctatttcctgatgaccaaatctctcaacgaatcatgttattaataaatatttttagcactcatcagtattctccaatgtgaccttctcattggagtacacagaaggaaagcaaagaagagcatctgacttctagctctggcttacagcctctctaccaggccgaagcaagagacccgcggcagcagctccccgccactcagacctgggtggtgataacctcaaagaatggctctgttttctattgacagaaaacccacttgattttgcttctgagttagcagtcagaagaccctctaagtacaatagaagtgctcttaacggactctgcctgtgtgactcccaggccccggagtctccatctctctcgtaagccacctgccacagcacagctggaggctgttctctggtgttctcagcgctccggctccctccctggagttgtgcacccgtcccaaactcctccatgcaagttctgcttcctcttataagtacacaactcagttaagtattcacatacacacagaaaatacgggtgtgaaaagaaagaattttctgtaaaaattaagttgaatactttggtaaaaagtgataaaggctgagttgccaataaaagttgcttttaaattaggtgtggctgggaatattataagatattggggaaaatatacaaatcaagaaaatttctgagcttagattgcttcatagatttatttaagtactcatcccacctttaaaacctctaaactgagaagaagggacccaaatcatgttattggtgtgatttatgtgagaagtagaactgtagtcattggacccttaggcaaaggaaaatccgtgtctttatatcagaagatcggcaaacgaatgtatattacacagtttaggttatgattccctactttaacctacttactttattaaatgaccaactactgatactgatcacaatagttattagagattctaatttagttggaaggttctaatcactttcattacaggcatttgaaaaatagggattcatttcgaatatattagccaggagcatagttagatgttacccaggccatttatcatcctgttaatgatgattttcccgacccttgtgagatcagcgtgacaggagtgtgtgtgtgtgtgtgtgtttctgtgggtgtgtggttttggttgggtgctgccaggtggcaaaggcatatgtaaatacatctgatctgcatctttatttcacagttaactaaaagtaaaaatgtctattctgattccatattgattttgtctaagatgtaaaaatttgagttcatctttggccaaaacctacctgaattaacatacaaaatatttgatttttaaaatttaattcaaatctcaaaatcaattaagtattctcagatcctatatcttggttaatatgctcccagatactttaaacatggcaaccttttggcctaagagaatgtttgttcatggaaaaaagcttttgagatgagagggtgtcttactttcttgtggcaattgattttctgttttaacaccctttgggtaaaatcttgcaaagagcttttataatttgttttactgaattgtatggagattgtataccaagtaaagctcttttaaattacataagatgagtgtcttgcatttctttgaaggtcaaagcccaaggaacctgcttgttgaagtgcattaaatatttgctaaatagagtaaatcactaaaggttagtgtgtctactaaaaatacaaaaaattagccgggcatggtggcgagcgcttgtagtcccagctactcaggaggctaaggcagaagaatggtgtgaacccgggaagtggagcttgcagtgagccgagatcccaccactgcactccagcctggccgacagagcgagactctgtcttttaaaaaaaaaaagagtttttcacctagattaagtcagacccacccaatataatctccatttttgttagctcaattgtaattgttagcttaattgtgattgttattgttgagggtgtttattttttagaatggaatttggtttgacagctgcttatttgtttcacttgaattccaaggttatagtttagatttataaggagaagactactatcagcagaatttatccttgaagagataaatgctagtttgacctcaagaacagtttctacttgattaaattctgagtctttagtaattcaggaagatgggtggtagtgcacctgcttggttggagtgtatagataacaaatgtttggactgttatgttcaaagcagaagttgaaatttcaagcaaaaatggtcagacaaaatggaaaaaaactggcagtgaggtctcaaatattctgtactgacaggtggtccctagcaaaataagaataataatatagataagcaggagatgtgggatatgaatgaactgacatggaatgggctgacatggacaccaggcacttgacagatgaaatgttttttttctctgcccctcctttcagataaggtgtctgaaactcatttcataaaccttttcgttattatttagaagtttgctttataagattgtttttcaaaatgcagataatagaactatagtataatgtgaagtcaatttcatgggttacaaccaacatttaaaaggaaaggagggagggagggaaggaggaggacagcctaatgttaaatataagtgctgttttgtggattatctattccagttataggtattcatttttggggggtacaatataaaatatatttcttccgtgagttatagtcaggctgaaagccaggcctttattagctgagggattctgggaggatggcagcttgaacttacctgtgtccttgccctctgtgctagcagaactgtctgaatgaacactggtgatattaaagaactagcataatgatagagaatggctgggctcccggctaaaccccacccttaagcctggaaccctggccctaagtgaaaacagctgaccctgtttttctgcccaaatgttgccttttggggctgccatgcccctatcctgtgcccataaaaagacttcaggtggcagagcaacacaagcagctgaacagcagggatacaagctgccaactggcgggaatacaagcaactgagcagcagagactacagatagacccagctaacttcagatgtggcttcagggaaagatcaccttcccacaccatcccctttccaactcccatcctactgagagccacttatatcacccaataaaatcctccacatatactacccttcagtccattcatgtgacctgattgttcctggatgccagacaaggacccaggtgccaggagggcaggggcttggatgctgctgtggggcccagcagagcctgcctcctgccaaagaggagcaactgtcctgttccagccttccttctctccggttcctgcactcacttgctcgcatactccctctcatgaggagcagccagcagcaggctgagtgaaacagccactccagttttcacccatgaaggggttcccttgaagggaacagtcccatctcaataattcttatatgtgatatggacattttcttaagtttcttaagtttctttaaggttcttaagtttctttttaaagtccttatattttaaaatatatactgaaatatttacagacaagtatatgtctaggatttgtgtcaaaattttgtggggcatctagatgaaacaaattaacaatgaaaagatatggcttaagctagtttggaatttttatatagtgaaaagagagaaattagacccaacgaaacagactgaaactaggaacaaaactaggaagataaaatttaggagatagctgaaatcaatcaatgcaacaaatagtagaaaggataaataaattcaaaattcagttattttaaaataaagcagttaaacactgggccaacctgattaagacaaaatagcaaaaatatacaacagtagaaatgtaaaatatataattccagaatcagggataataataattatatgaggataacatatgcaattctgtaacaaaaataacctataggaaatgggtgactttctaacaaaatagaaaatgtcaatgtggcctgaaaaagaagttgaaaacttgaatagacaaaacccatgaaagttctggcatggggttcaaaggttgcaaaggacatttggacaagaagggtgcacagccagattctttctcactcttaaaggggatgactcccaagttcacctagtctcagccatagaatagggagaaccccaagttttaggaaagctagtccaactttaacaacaaaataacacagagagtgtatcagttttctattactacataacaaatcaccacaaactttgcagcttgaaacaacacacatctattatctcaaggttttgtggatcaggagctgaagcacaggttagctgggtcctctcctgtctcacaaggctgcaatcaaggtatcagccgggctgctttctcatctggagttacaggacctcttccaagttcacgcaagcttgtggcaaaattaaattccttatgcctgtgagactgaagccattagctcctagaggccacccctctctaggcgattcacagcatggccgttagcctcttcaaggccatcagaaagcatttctccagttactgttttaagagtttttcggccgggcgtgatggctcacgcctgtaatccagcactttgggaggccgaggcggatggatcacaaggtcaggagattgagaccatcctggctaacatggcgaaaccccatctctactaaaaatacaaaaaattagccaggcatggtggtgggtgcctgtagtcccagctactcaggaagctgaggcaggacaatggcatgaacccgggaggtggagcttgtagtgagctgagatcgcaccactgcactccaacctgggcaacagagcgagactccgtctcaaaaaaaaaaaaaacaaaaagtttttcacctggattaagtcagacccacccaatataatctccatttttgttagctcaaaatcagcttgtttgtgacctgaattacatctgcagaatcctttcgcttttgctatatagcctcgcctaattacctaaataggagtggcatttatattcataggctcatccacacttaaggggaagggctctgcagggcatgttgttcaggcagtgggaatcttgggggccatcttagaattcttcctaccacagacagtttaaaagaacagggtctgggccaggcatggtatctcacgcctgtaatcccagtgctttgggaggccaaggcagaatgatcacttgaggtcaggagttcaagattagcctgggcaacataacaagaccccatctctacaaaatatatttttttcaaattagccatgagtgatggcacacacctgtagtcccagttactcaggaggctgaggtgggaggatcccttgagcctaggcgtttgaggcagcagtgagctatgattgcatcactgcactccagcctgggcaacagagcaagaccttgtctcttaaaaaaaatgtaaaaataaaagaatagggcctggcgataactgagtggcaatggttaacatagggcttttgtaaactttgacagaaaggagaaacacaaggtgaatcccagggttacccaggctttctcccttagaggattttccaaactgtggcacaggaaaatggagcccaagcagagtatgtcaggctttctggaggaagcagattggagttgatagctgctgaggtggctggggtttggcaggggttggaggggcagagcaccagagaggagggagttggaataaagaaaacctaagaatttcccattgggtccttggtcagttcctagcctgcagaggcttagcagagaacatctggtcagtggcagagctgaacagaaatttcagaggttacacaatcccgaggagacactggaatttgggtccagctggggctgagagaccacggtcaatctcccaggcattcagctgagactctggagagactataccttatcctgggagtagaggctgttatcccaattgcctgccagaaacaaatgtaaatctgctatgaaggatgatagccttattcatggcttcaaattgtctttacactttttatatacacaatgtagcactcaataaaataatcaggaataattttttaaaactgagaccaagtgtggtggctcacacctgtcatcccagcactttgggaggtcgagaagggaggatcacttgagcccaggaatttgacagcagcctggacaacaaggcgaaactctgtgtctacaaaaaatacaaaaactggccgggcgcggtggctcacgcctgtaatcccagcactttgggaggccaaggcgggcggatcacgaggtcaggagatcgagaccatcccggctaaaacagtgaaaccccgtctctactaaaaatacaaaaaattagccgggcgtagtggcgggcgcctgtagtcccagctacttgggaggctgaggcaggagaatggcgtgaacccgggaggcggagcttgcagtgagccgagatcccgccactgcactccagcctgggcgacagagcgagactccgtctcaaaaaaaaaaaaaatacaaaaacttacgtgtggtggcatgcgcctgtaatcccagctactcaggaggctgaggtgtgagaatcacctgagcctgggatatcaaggctgcagtgagccatgatcatgtcactatactccagcctggtgacaagagtgagagcctgtctcaaaaaaacaaaaacaaaaaacatgactgaaacagaattgaagtagaaacagtgccacaggcaaatcaaatattgcagcctgaagcatagactttaaaataactatgtttatcatatttaagactttaaatgacaagaaggagaatttaggtgaataactgaaaactttataaaagcaaaatggaaatgctagaactgaaaaatgcaatgaattaagtgttcactgttgggttagacacagctgaagagagttgatcaactggacaataggttagaagaaaatatccagactaaaatattgtgggctggggagaagttgaaaaacaaaggaaaggctgtgtgtggtgactcacacctataatcccagcactttgagaggccaaggcaggatcggttgggcctcaggagtttgagaccagcctgggcaacatagtgagacccgttttttttgttttgttttgtgtcgtgttatgttgttttgagatggagtctcgctctgttgccaggctggagtgcagtggcaagatcttggctcactgcaacctccgcctcctgggttcaagtgattctcctgcctcagcctcccgagtagctgagactacagctgcccaccatgcccagctaatttttgcatttttagtagagacagggtttcaccatattggccaggatggtctcgatctcttgacttcatgatctgcccgccttggcctcccaaagtgctgggattacaggcgtgagccaccgcacccagccctgtttttatttaaaaagaaaaaggagagcatggagtatattttggtatattttatgccattctataagtggtactggagtcccacaaggagaggaaatagaatgggcctgtatgactttgggcatgctactcatattcttagcttcatgtcttcttttgtaaatggaggtgtaatcataatatacctattggtttgtggggtggattaaatgagataacatttcaagcactaggcccaatatctagcacatggtaagtacattagatgaaagctgcaggattattatcacagtcgtcttcaaaattagaatgtgaaagagaaaagcatgaagagcaaagttacaggtgagtctgacagatactaaagagcccttagtaattttatgttaactattcttgctgtagaaaatatctttaaaagcaaaaagaaaaaaaaaaagaaaacttcaaggactgaggaggagattaagagaacagttttatagataaattagtttcttagtaattcctgaggtgtgtatttgcaacacaaggaaatggatttgtgtttgtgtctctgtgcgggtgaggaagagagacagaaaaatagagccatggacaaagaccaagagagactgattgattggatgttcttagaggagacattatcattgttgaagataaatgccaaagccctgccaaggtgcacatattcataaagaagtagaaggggctgattgtgcgtgaatctgcttaagaaagggaaaggagtgaaggaacatgatttcaggactagcccggtaattagaactgcagtgagctaattaaggctcataaatttaatgaaactattagcattttctcttgcaagaaaaggtatatgttttctctcaggaaatgacacctgtgaacaattatctctcatttctattaagattatttacataagttttgctcatttggcactcactgctgttaattattattttttattttttacaacacctgatatcacactagattcactctgtaggaaggtgctttgggggttactgataattaatagtttagcacaaatagacaagaccattgttaggggacctgctgtactgttactgtgctgtctttgtgggcagcctttttgtttaatagaaaatgtttcagaatctttgaatatctgtaagagcctggtagattatgaaaattatgaacacaacctttcctaggccatcatgtaactcaatggtttcttcagtgagaacttcctgagtacctactgtatgccagaggaagaggtgagaaaagggcgtgaggataggtttatgatataaacatgaattcaaaatatcctattattgcactgaattgaaatggatatgatgacctctaagggaaagccaagggtgtatcatttaggaaatttcaaattgcaagtgtaaaccaaaagtatctgagataagtcttcatttagaaagtttattttgccaatgttaaggacacaccatgacacacagcctcagaaggtcctgatgacatgtacccaaggtggtcggggtgcagcttagctttatacactttatggagacacgagacatcagtcagtacatgtaagatgtacactggttgagtccagaaaggtgggacaactcaaagtggggggctcccaggtcataggtagatttagagatttttctgattgacagaaagagttactgtcaatagaaaggagtgtctgagttacagtaagggactgtggagtccaaggttttatcatgcagatgaagcctctaggtagcaggcttcagagaaagtagattgtaaatgtttcttatcagacttaaagagtctgttctatccataattcccaaagtacggagggtgtaatgaagcatgtctagttcccccttcccatcatggcctgaactagcttttcaggttaacttcagaatgcctttggccgaaagaggggtccattcaggtggttggggggccttagaattttatgtttgatttacacaagtttcggaaaacctaacccaagttgtcttacataaagggaatgttttagcacatttaacttttttaggcctttaggtaaggcttaatctgatatcctagtaattagatttattcaattaatatttgttgagacctaaaaggccttgggaatacattagtgtctaagacattccgtattctcattgagcttacattttagtagaggatacagacaacagataaaaaaataacagaaaacatccaaatgttttaagagaaatgaaagtgctatgatagagtatgagtgggtggctccttgggtttgggtgctcagaaagccttcttggaggagatgtttaggctaaaatttcaatgactacacccagaagaatcacgctatactaagattggagggaagaaggctccaggccgctgagccagtatcacaaagtcctgggcagaaaggagcttggtgcgcctgtcagatgcagcacacaggagaggagagagtaggagaaggatgcagaaggcagaccacacatgccaccatgaagaagttgaatttgttcccagatgtgattcaaaaatggaggattttgagcagggtagtgacattatctcatttgtgtttcaaacagcatgtctgtgaatactgtatttttctattgctgccatatcaagtgaccaaaaacatgcagcttaaaacatcacaaacgtggtctccagttttgtaatcagaagtccaggtagagcaggaagtgactgtgtcctctgcacagaatccaggaagatgaaacctaggcttccttctggaagctccagggatgagtctgtttccaggctcattcagttgaagaaccagggttctcatttcttggctggctctcagctagggaccacccttagctcctcaagaggttcttgctccatagccctctacatctcaagaccaccagcagggtgtcaagcttcacactgccacattccttctgtctcttctctgccgcatcttcttgacttcagctgggaaagagtctccacttttaaggactggtgtgtgttagattggaaccaccagataatagaagataatctccctcatctcaaggttcataattgtcatcacatttgcaaaggccctttggccaaggagcatgacatattcacaggtcctagagattaggaagtggacatttcctagaaattaggaagtggacatttcagagcagggtggcattaatcagccaaccacagatgctgggtggaaatcagatgtgtgggtgaggtatgcgatcagaagcagggagaccagagatcaggaaatttcggtagtccaagtgcaacgttatggtgtttgggaacagaatagtaggtaggggtagagaaaggaggtagggctgacaggacttgctggtattgtaacaacgtaagtggaaccggagatcattatgttaagtgaactaagccaggcacagaaagacagacatcacatgttctcacttacttgtgagagctaaaaattaaaataagtgaactcatggagatagtagaaggatggttacccaaggctgggaagagtagttggggagtggaggggaagtggatggttaatgagtaccaaaatcatgagtaacacctagtgtttgctagcacaacagtgcaactgtagtcaaaaataattgaattgtacattttaattgtgcatttaattgtacatactaaaagtataattggaatgtttgtaagacaaaggtgtattattctgttctcacgctgctaataaagacatacctgagactgggaaatttataaagaaaaaggttcagtggactcatagttccacgtggctggggaggcttcacaatcacagcggaacattaaagaagagcaaaggcatgttttccatggcggcagagaagagagctcgtgcaggggaattcccatttatgaaaccatcagatctcgtgagacttactaccacaagaacggtatgggagaaaccacccccaggattcaattatctccacctggccccacccttgacacatggggattattacagttcaaggtgagatttgggtggggacacagctataccatatcaaaaggataaattcttgaggtgccagataacgccatttactctgatataattatgcattgcatggcggaatcaaaagatctcatgtaacccatgaatatatatacctactacatacccacaaaaattaaaaataaatttaaaaaaaagacttgctggcagattagacattaggaataagagaaagactatgaggaacaacaaatttttttcttggcttgcataacttggtgtataatggtgccttttcttgatttctcttttttttaatgaacctaacattatgaacataaaaggatgccttttcttgagatggagaagagtatgtggtattggtgttcaacaaatactctggttctcccctcttctcggccccttttcgcctacgtggggccttatgacttgttcttgacaatgagatatgtcatttctgggtcacaacattcaacttcccttgcaaaatcctccagaactctctccccagtggtggctgctgctgtgtccatctgggtcctggaataaggatggtgaggagcagagatttctcgccaacttgcattcaagttgtactgtaagaaataaacctgtgttgttttaagtcactgagatttgggggttgtttgttattgccccacagcttcacctattctgacctgacatactgggggaggagcaggaaaaaagaattgtgaattggccatgtgaagtttaaggtgctttttcagtggtgttccaggtctcaggcctctctgcccactgcactgctgtgccgtgaggagtgtaaacatattccaccccattcttgcagacccgctcctggttctagaatagccgcccactgctctcaaggtctgtatgtttcctggtccaagttcagagcggggaaagtgtacctccaagatagctcaaagggccagtactggagcctttttgacctggcttggttcatgtgcccatcgtagagccaaccactgtgaccaggggcatgggttcagtagatgacttggaccagtcagtttctatctctggagttggaatgtggaaacaatcacacgtaaatcacctggctaggaaagccagagtactactgggaagggagatgctgggaatacatgtccagtacaaggaaaaagacatcttcaggttcctgcggcaaatctggcactgcccttggcactttgtgtggtcttacctgtagggtccagccctacggggcttagcgggtgttctccccgtgtgcggagacgagagattgtagaaaagtaaagacacaagacaaagagttaaagagaaaacagctgggtccaggggaccactaccaccaagacgcggagaccggtagtggccctgaatggctgggcgcgctgatatttattgcatagaagacaagggggcagtgtaaggagggtgagtcgtccaagtgattgataaggtcaagcaactcacctgatcatgggacggggcccttcccttttaggtagccaaagcagagagggaaggcagcgtacgtcagcgttttcttctatttacttgtaagaaagatcaaagtctgtaagactttcactgtttcttctactcctgtctactaagaacttcaaagaggaaccaggagtatgggaggaacatgaaagtggacaagcagcgtgaccactgaagcacagcaccacagagaggagtttatgcagccggatgactgtgggagggcctggataatatctagcctcccacaagaagcttgtggagcagagtgttccctgactctaaggaaaggagactccctttcacgttctgcaaagtaacaggtgccttcccaggcactggcgttaccgcttgaccaaggagccctcaagcggcccttatgcgggcatgacagagggctcacctcttgccttccaggtcacttctcacaatgtcccttcagcacctgacgctatacccaccggttattccttggttatattagtaatacaacaaagagtaatattaaaagctaatgattaataatgtctatactactgattgataatgtccatgatcatctctatagctaatttgtattataactattcttattctaactattttatttattatactgaaacagtttgtgccttcagtctcttgcctcagcacctaggtaatccttcacccacacttaccagtattcccatccttcagggaaccattgcaaacactgataatgtggctagaattgacaagaatgtctcccatgtaacctttaaccaccgtcagatttattttgacaaacatttttcccatacaagcaatgaaaataataagtaacttttttttttttttgccagtgcctcaactacagtaattagccatgtagagaggtgcctaaagaccctacagtcagctcatttgtgtcaggtatgttacctttgaaaccatgccccaaagagttaactaaaaccaatgactgactgaaattcttgagcttgcaagatggcagataagaagaaaaacaatttgctgaaacgctgaaactccctccacttgtaagataacaaaactggcagaaatcagttggaccaatattgccaattgcaatctgcactgaaggagcttgtggacatcacagcctacgtttccactgtacatttcttactaactcaccgcagacttgtacatgagacccgtgagggggcatggagagataactgcagttaaagtcctgtgcaaggactttccagacctcccccttcgttccaccaatctcctgctaatcccagaacccagccactaaaccttttctaataaaagtacggcctaaaagccagcacagagtcagatttgagctgaacacctgtctccctgttggtcgacccataacagaaagcttttctttagtcagaaataatggtgtcatcatattggcttctagcgcatagagcagccagcccttctgctcagtaacaccttccttgcccacatcctcttattagagagctagctgagaccacattcatgacccctgcccacagccagctgcccatgtttgtcttacccagggtgaaccatcattcttctctgtgtatttggaaatgtgattcagagattctaattggtctccagtggcaacttgaatcgtgaagacatgaggctagagcagctatgtgcacactaagaagacagccagcctgcagcctgccatgaagcaaacacgaacagtagccatgagaggccaggtgcccccaaggaggcaggcagaggaaacctggggtgtggactcccagggcccacgtgtaagtccctcccaaggctcaccctcattcattgttcctgggtttcatgaagctcctggttacctttcagacgaatgacttctctgacctgggctaaggcaagaacaccttccttataactaagtcgtccccaatgaagaccctaaagaattctcatgagtctgcttttcttgaggcagacaccttttttgtaatgctctttcataacaccaattccaaacagttaaaatggtacttctcaccctgaattctggttaattacatatgcttctgcccttctcacagtgctttgaaattcttgaaggcagaaacttttttttccccacctttaaatccccagtggattcttggagtgagtgtgtatcaagggtttgtggccctggattctgcaggtgaggtcagggtcagatgacagtgatactcagtgaactataattagtgtcttccttccaaggagagaaacagaatgagagcgtggactgtgatgcctggcgagataacttccctgcctactacttttcaaagaaactgacctacctatacatccccaaaagaatatatgaatatgaaaactccactaaaaatatccaggcattcaagtcaacagccaaaaaaaaggcagggggaatagtgacagaatacaaagatagaacgtgtccacttaaaaacaatgtctaccatgtcagtgtcaggtgcagtgctctgatatttattggtagaccaaatataattttgctgttcagatcttcaatatgtatagaattatttctgtgtttctttcttctgttagaggttgagaggcgtttgactctcccactgtgattgtggatttgtctctttctcagtttattttattttatttcaagacggaattccactctgtcacccaggctggagtgcagtagtgtgaacttggctcactgcaacctctgcctcctgggttcaagcgattcacttgcctcagcctcccgagtagctgggattacaggcacacaccaccatgccaggctaatctttttgtatttttagtagagatggggttttgccatgttgaccaggctgatctcgaactcctgacctcaggtggtctgcccaccttggtctcccaaagttctgggactacaggcatgagccattacgcccaccctcagtttagtcctgttaatttgctttatatattttgaaactgtgcagttgggtacatcagtatttagaattgctaacatttgcagggggactgttctctttaaacatctatgaaatgcccacttaatttctaagcagtgcttctgagctaattttgttcaataccaatgtagtctaccagttggtatatatatatatttgtgaccttcttctttgaacctttctgtattcctgtatttatgatatgcttttatatagttagggggttttttttgcctccatttttactcttttttttttttttggagacagtcttactctgttgcccaggctggagtgcagtggcgcgatcttggctcactacaacctctgcctcccaggttcaagtgattctcctgcctcagccttccaagtagctgagattacaggcatgcatcaccatgcctggcaaatttttgtatttttagcagagacagagtttcactatgttggccaggctggtctcaaacttctgacctcaggcgatccacccacatcggcctcccaaagtgctgggattacagacgtgagccactgtgcctggcccattttttctttttaataaaagtctttaggccaggcacagtggctcatgcctataatcccagcactttgggaggccgaggccaaaggatcacttgaggccaggagtttgagaccccccaccaagcaatgtagtgagactcatctctacaaaaaaataaaaattaaaaattagccgggcatggtggcacatgcccatggtcccagctactagggaggctggggtgggaggatcacttgaacccaggagttcgagactacaatgagctatgatcccaccactgcactctatcctgagtgacagatggagaccctgtctctaacaacacaaaaaagtttttagtctgtttagaatttaatttaatcactgacagatacattggagtctacatacactgtctcactgttagttttctatttgacctgttttatattcagttcacccctctgtaagcttacatactctttaatatttttttctgattttatgttgaaatggtgtcgaatttatagaaaagttataagaattataaaaagaacccagattcactgatttttaacatatgaccatattggctttatcattctctcagcagattgatagttacaggaaaacatttattattatttcttctgaattatttaggtatatgctgcatatatcataccactatgcccttaatttttcagtgattatttcctaagaataagggtattcctttatataaccacaattattttaccaaatttaggaactttaacatcaacatgtaataatctatagatctaatgatgtaatctaatgatatatatctaatttataatatatattctaatgtagttaattgcccacaaaatgtttattatagcaattatttttccagtagagaatccattttggaattgcatttagttgtcaaatctttttttttttttttttttttgagacagagtcttctgtcgcccaggctggagtgcagtggcacgatcttggctaactgcaacctcttcctgagttcaagcaattctcctgcctcagcctcccgagtaactgggatagcaggcacgcatcaccactcacccctgtaattccagcactttgggaggccaaggcgggcggaccagttgaggtcagcagttcgagaccagcctggccaacatggtgaaatctctctctactaaaaatacaagtcttttaagtctcccttaatctggaacagttcctcaacctttctttgtctttcctgaaatttgtatatttgaagaatacagaccagttattgtatagaatctgctacattcccgactggactgctacataaatgatactgtgtcctcaggtatcacacctggaggcccataatattcatgttcccttattcaatgatactttttttgtttttgagatggagttttgctgttgtcacccagtctggagtgcattggtgcaatctcagctcactgcaacctcttcctcccgggttcaagcgattctcctgcttcagtctcccaagtagctgggattacaggcatgcaccaccacgcctggctaatttttctatttttagtagagactgggtttcactatgttagccaggctggtctcgaactcctggcctcaagtgatccacccatctcagcctcccaaagtgctgggattataggcgtgagccaccaagcccagcttcaattgttatttgaactaattatttgtccttccttttaatcgtggttgttactcttgtgaaatagagttgagtttattggtttcagttggcatttagagtttttccccatgtatactgatctaattttatttatttatttttactatttaggacattaacatcatgtaagagtgaaaacaataaaaaagactcaaagaatgttgctccttcctcattcctgctatctcatcctgctcctcttgtacagaatcccttcttttttttttttcgctctgtctcccaggctgcagtgcagtggtgcaatcttggctcactgcaagctccgtcccctgggtccaagcgattctcctgccccgagcctcctgaataagctgggactacaggcgcctgccatcacaaatggctaatttttgtatttttagtagagactgggtttcactatgttagccaggctgatcttgaactcctggcctcaagtgatccacccgtctcagcctcccaaagtgctgggattacaggcatgagccaccatgaccagccatatataatcctttttattcatttctgatttacccattctttgtttctttttgcaaaaatccgctgatatgcatgttttattatttttttattatattattttccatttttctttacacaaaatgaatatattcttttgcactttttactttttgataatataattatatattatataacttatatagttatatataatcatatgtaacatatatgattatatcatatatgacatatgaatatataatcatatataacatataaatcatatgtaacatgattatataaataatatataacatgatttatttaatatgtaacatacagttatatataatcatgtaattatactataattataatcataatatgttataccataatatatatattatatatgtaacaatatagtataattaaattattatatcttacatactatgcaataacatactatagtatataactataatatatagtatagtatagtatatagtatagtatgttataccataatatatatattatatatgtaacataatatagtagagttaaattattatatcttacatactataacatatatagtatacactatactataacatatacagtatagactatactataacatatatagtatagactataacatatatagtatataactatactatatagtatagtatagtatatagtatagtatatagtatagtatgttataccataatatatatattatatatgtaacataatatagtatagttaaattattataatatatcttacatactatactataacatatatagtatataactatactatatagtatagtataacatatatagtatataactatactatatagtatagtatagttatatagtatataactatactataacataatatagtatagttaaattattatatattagcattccatgtgggtccataaatacactgttgtacagatgttatgcccattaacaattattgatatgattgatctcaatgctctcacattgttctaattacagcgtgtattatatttaccctgtttctctatatgatgtataagtatctcacattctacaattattttttatattttggaagcctcatattttgtttcactgattaccttatttatacctttgatgttcttcattcagcataaacaagaaagctcatctgttatctactcaacaatcatcggtcatagtctacttttctccttctccattctgctccaatttttagttgcattctttccactttgtcagaaaatattccgtttacatactatttctccaccatgtctccacttgttgtaagtgtctcataattacctgaagtgatagagcatcatttctaggtactttgtattaaagatggatctttattataaactcacagcctctctctgtccctctccctgcctttctctttttctctcggcatttgtgcatgaaatatatattaaacaaagtacagctgcacaattaaaaagaaagaaaaaagaaacaacatatgggataaatggaaaagaaagagcaacatagaacatctagaattaaacttatcaataattatattaaatgcaatgatcaaaactacgattaaaaggcagatatcatcacattggatacaaagcaaaactttaaagaagcacactttgaataaaaaggcatgggcaggtttaaaataagtaggtgccgggcacagtggctcacgcctgtaatcccagcactttgggaggccaaggggggtgtatgacctgaggtaggagtttaagaccagcctgaccaacatgatgaaatcccatgtctactaaaaattcaaaattagctgggcatggtagtgcatgcgtgtagtcccagctactcaggaggctgaggcaggagaatcatttgaacctgggaggcagaggttgcagtgagccaagatcacaccattgcactccagcctggacaacagagcaagactccatcttaaataaataaataaataaataaaataagtgatgacactaacagtacaggcaacaaaagaaaaaaacaaattggactgcatgaaaatttaacattttgtacattgaaagacactatcagtagtaaaaaagcaaccccacagaatggaaggaaatattttcaaatcatacatctgataagggattaatatccagaatatatagagaactaaaatgaagaaaaaaaattcaaaaatgagcaaaggacttgaatagacatttctccaaagaagatctacaaatgacctacaagcatgtaaaaagatactcaacatcactaatctttagggaaatgcaaatcaaaactacagtgagataccacctcacacccattaggatggctactttcaaaacaaaacaaaacaaaaaaccacacacacacacagaaaataacaagtgttggtgaggttgtggagaaactggaactcttttgcaatgttggtgggaatgtaaaatggtgcagccagtacagacagcagtatgacagttcctcaaaaaattaagcaatgaatttcagcaatgaatgggtacttctgggtaatacccccccaaatagaaagcaagattgcaaagagatatttatacacccatgtttacagcagcattgtttatagcagctacaatgtggaagcaatagtatccatcaacaaatgaatggaaaagcaaaatgtgatatattgatacaatggaatattactcagcctcaacaaggaaggaaattccgcagtatactgcaacatggatgaaccttaaggacattatgctaagtgaaataaaccagtcacagaaagacaaatactgtatgattcaacttatatgaagtacatagaatagtgaaaatcatagagatgggaagtagagtggtggttgccaggggatggcaggggttgagggtggagggaaacaggagtgattgtttaattggtatatagtttcagttccgcaagatgaaaagtgttatggagatggatgttggtgatggttgtacaacattatgagtgtatttacactgaactgtacacttaaaaatggttaaaatggtaaatgttatgtgtattttaccaaaatttaaaaattgggggaaaatagatgaaaacagacactaatccattccccatctaacactaacataatctctcccactaacactaatcacaaaaatctgcagtggctatatgaatgtcagcagagtggatttagcaataataattattaccagggataaagagggatatttcacgataataaatgagtcagtttatcagaacaacaatcctacatttagttgaccctgacaaatttttgtttcatttatattaaagctttgatactttgattctaatttaacataattgaaaggatagattaacccacaaatacaggtaaagatcacaatacccttctcattaattgattaaacaagtacaatatttaggactattctacccaacaagatcagaattcacatttttttaggttcatacattcaacattcaacagcatacaccacagaagaggctataaaatgtttcagtaaatttacagggattgaagtcatgcaaagtatgtcctctaacaacagtggaattgcattggaagtcaataacagacagatatctggaaagcccttcaaatatttggaaattaaccaacagacttttgaataatccatggaccaaaaaaagaaagcaaaagagaaattaaaaaatattttgagctgaataaaaaagagcacacaacatatcaaaataggtgagatgaagctaaagcagtatacagaggaaaatgcatagctttaagtgcttatttagaaaagaagaaaagttagaaatcaatgacctaagcgtacaccctaaaaaactcaataaaaagagcaaagtaacaaaaggacgtgacaaagatccgagaagaaatcaataaaatagaagacaggaaaataatagagaaaaattaataaaatttaaaccagagttatgaaaaaatcagtaatactgataaaattcttttcctttttttttcttttttacccgaggatatcatcctctactggtacaaataagatgagggggcaaaagattttcaattacatgatgtcgttctcaaattacaggcaacattctaactagactgattaataaaaagagaagacacaagttatcagtatcagggacatcactactgatcctataaacactaaaataaaaagagaatattatgaacagccttatggcaataaatttcacaacttagattaaatagacttttttatttatttatttatttattttgagacagagtctcgctctgtcgcccaggctggagtgcagtggcacaatctcggctcactgcaagctccacctcccaggttcacgccattctcctgcctcagcctcctgattagctgggactacaggcacctgccaccacatgcggctaattttttgtattttttttagtagagacggggtttcaccacgttagccaggatggtctcaatctcctgacattgtgatccacccgcctcggcctcgcaaagtgctgggattataggcatgagccaccacgcccggccaatggacattatttcttgaaaaatacaaattgccaaactggcttaagaaaaaatataacatttaaatagctttatacatcttaaagcaatgattacttagcatgtatcagaatcaactggagtttgcccagttccagaatttgattttgttagtctggggtagggcataaaagtttttggacgcgtacagtggctcacgcctgtaatcccagcactttgggaggccgaagtgggtggatcacctgaagtcaggaattcgagaccagcctggccaacatggtgaaaccctatctctacaaaaaaaatacaaaaattagccaggcgcggttgtgcttgtctgtaatcccagctacttgggaggctgaggcaggagaatcacttgaactcaggaggcataggttgccatgagccaagatcacgccactgcactccagcctgggcgtcagagtgagacttcgtctcaaaaaaaaaaaaaagtttttaataagttccagatgatattatgctgctggcttattggccacattttgagaattagtgtcttcttttcctattcatttaatgtttatatttttacttttgttgtttctaaggttttttttcctggctttgttgaggtataattggcaaataaaaattgtatatatttaaggtgatacatgcaacatgatgtcttgacatatgtatacattgtgaaataattgctacaatcaagctaatcatcatatctatcacttcacacatagatgccattgtgtgtgtgtggtgagaacatttaaagtctactctcttaacaagtttcaagcatataatatagcattattaacttcagtcaccgttgccatacattaggtcaccaaaacttgttcatcttatgtaactgaaacttattgcttcttgagcaacatctctcttagcccccggcaaccaccattctactctatgcttctataagtttgactttcttagatttctcatgtaagggaaatcatgcagtgtttgtatttctgtgcctgtcttatttaacctagcataatgtcctccaagttcattcatgttgtcacaaataacaagatatcctactttttaaaggctgaataatatatgccattgtgtacgcatggaacacatagaaatgttgtctacataccacatcttcattatccattcactggtcaatggacaattaggtttattctacctcttggctattgtgaatagggctgcaataaatacagaagtgaggatagtagtagaattgctgtatcacacggtggtactacttttaattttttgaagaacctccatactattgttcataacgcattttttttgttttgttttgttttgttttttatggaatctcgctctattgcctaggctggaatgcagtgtggcatgatctcagctcactgcaacttctgcctccaaagttcaagtgattctcctgtctcagcctcccaagtagctgggattacaggtacccaccaccacacccagctaatttttgcttttttcgtagagacggagtttcaccatgttggccaggctgatctcgaactcccaacctcaggtaatccactcgccctggcctcccaaagtgctgggattacaggtgtgagccaccgcacccggcctgttgttcataatgactgtaccaatgttcaatcccaccaacagtgtacaagagtttcctctctgtgtgcctgctccccaaagaaatgagcgcaactgggaaaattatttttaaaaatcaaccatttaaagtttctggaaattgttctaagagcctgtggcaaatgaagaaatatttgttcaagaaaatcaatgaaaacattgtaaaaacagtaaaagtctgtggcatttgaaccacaacttcttcctaccctcaaccctcccagcttagcatgatggaaactcgactccaggcgtgagcagccaagagcgcagggctccttctcctccagctaacagtcgatggctacagaacctttcaaggagtggcagtccacagcatttattgccccccaaaaccagctacatgttgcagaggctaaattccaggcaagtgtggtcaagaggtttggggctccattcttccacccagatccccacaatagagtggaggctctacttatggcatgaaacactgcgaatactaggccctgatcaccctcactccagctagttcacagtttcaatgtcaggggaaggaagctgggaagaccagaggctaccaatctcatcccctatcctgctcctaaagcagagggatcactcagaagtgggctactgtctctgcccccaggctgatattttgccagggtaagaggcaaaccatgagaacagagatctctgaagccctccccaaaggaactgactttattttaaacaaactatagggaagtccatgcctaagtcacaaaccatggaggttttggtggtaagcaattaaggatattggtagcttcatgtgaaccacaagctaaactataggtcaactagtttaccagagagaaccaaagaaagaggacattaaaaggagccttcctgctcacgcctgtaatcccagcactttgagaggccaaggtgagcagattgcctgagctcaggagttggagactagcctgggcaacatggtgaaaccccatctctactaaaatacaaaagaaattagccagccatggaagcatgtacctatagtcacagctactcaggaggctgaggcaggagaattgcttgaacccgggaggcagaggttgcagagagccgagatcacaccactgcactccagcctgggcaacagagcaaaaaaaaaaggggggtgcttcctgggataaaaaaaactaaccttaaacactagactcataaactacataaactacttttacaaaaggaccccagtgtaacaggatgagactatgaagcaatttctgtctcagagcattgttgaaaacatttgcgcagtcagctagcaatgattggagcttaaagacgggtgtgatcagggaaagagactaagaaagcccctctggaaccactgtcatgagagagtgactgtgtacaggcccaaggttgcacatttcaaggggcaacaactccactaaaatagtccatctgatcactaaacaaatcagcccagggggagggagtcagggtctatattatctaactattcctaaaaatgtcctgttttttaaaaaattacaatacatgaaaagaaacaggaaaatgtaactcataggcaggaaaaaaacaacataaacaacaaaaaccatctgtgagatagctcagacgtcagatttaacaaacaaagtttccaagacagccatgttaaatacattcaaagaagtaaaggaaatcatgctgattgaagtatgatgaaaatatgtcattatataaaaaatatcagtggagagataaaaattattttaaaaaaccaaatatttccatctggagctgaaaagtacaaaaactgaaataaaaaattaaatgggcttaaacagtagatttggactagcagaagaaaaaataacaaacgtgacagtagatcaatagaagtgatacaaccagcagaacagagagaaaagaagaaaaatgaatagagccttagagacctgtgggatgtgatcaagcacacaaacgtgcatactgtagaatcaggaggagacagagagagagagaaagagagaggagaaagaaattctaggaaataatggctgaaatcatcccaaatttgatgaaaagcattcatctgcatagtcaagagcttaacaaataacaagtaggatcaacacaaagagatacacacagagatgcattgtagtaaacctgctgaagatacagagaaaatcttagaaacaacaagaaaaaaacaatttgacatgaataagggaaccacagcaggatttaccactaacttctcctgagaaacaatggtagccaaggtcagtggggtaacatactcaaagtgctggaaccaagaattctttttcttttttttttttttttttttttgagacagggtttcactttgctgccaaggctggagtacagtagcatgatcatagctcactatagtcttgaactcctggactcatgggatcctcctcctgcctcagcttcccaagtagctgagactaccagcacaccatcatgcctggctaatttttttttttttctgagacagggtcttgttatgttacccaggctcatcttaaactcctgaactcaagtgatccttctgccttggcctcccaaagtgctggaattataggcatgagccaccaagcctggccaagtcaaacaagaattctatatccagcaaaactacccttcaaaacatgaaaaataaatttaagacttttccaggcaaaaactgagagaattcattgctagcagatctgccctacaagaaatagtaaagagagtccttcaggctgaattgaatggacactaaacttaaacccacctgaagaaataaagaccactggaaaataaaattacatggatatatacacagtataaatgtattctttgctgctcatttttctcctgacttaaaagacaactgcttaaacgaataatttaaaacctatgtgttttatcccttttaatactattgtaaatgcattttttctttctttttttttaaattatactttaggttctgagttacatgttcagaacatgcagttttgttacataggtatacatgtgccatggtggtttgctgcacccatcaacccatcacctacattaggtatttctcctaatgttatccctcccctagctctccactcccccgacaggccccagtgtgtgatattcccctccctgtgtccatgtgttctcattgttcaactccacttatgagtgagaacatgcggtgtttggttttctgatcttgtgttagtttgctgagaatgatggtttcctgattcatccatgtccatgcaaaggacatgaactcatcctttttttgtggctgcatagtattccatggtgcatatgtgccatattttcttaatctagtctatcattgatggacattcgggttggttccaagtctttactattgtgaatagtgccacaataaacatacgtgtacatgtgtctttatcatagaatgatttataatcctttgggtatatgcccagtaatgggattgctggatcaaatggtatttctagttctagatccttgaggaatcaccacactgtcttccacaatggttgaactaatttacactcccaccaacagtgtaaaagcattcctatttttccacaacctctccagcatctgttgtttcctgactttttaagaattttttcttgattttattttcagagtgttcattgttaatatatagacttgcaaatgattttttatattgaacttgtctcctgcgaccttaaagaactcttgtattcattctgatagctttttagtggattccttagtgttttatacatagaagattatgtcatttgtaaatagagatagttttacttcttcctttccaatgtggatgtcttgtaattctttttcttctctaatttctctggccagaacctccggtatggtgttaaatagaagtggcaaaagcagggaggccgaggtgggtggatcacgagggcaggagatcgagaccatcctggctaacacggtgaaaccctgtctctactaaaaatacaaaaaactagccgggcatggtggcgggcacctgtagtcccagctacttgggaggctgaggccggagaatggcgtgaacccaggaggcagagcttgcagttagctgagattgcgccactgcactacaacctgggtgagagagcgagactccatctaaaaaaaaaaaaagaagagtggcaaaagcagacatctttctctttttcctgatcttgggagggtaaacattcagtctttcactattaagtaggatgttagctgtgggtttttcataaatgtctggtttcaggttgaggaagttttcttctgttcctagtttaatggacattttttatcatgaatgataacttcctgagaccaaactgaagaatacgtaaatgaaggatattggtaactagatcagattggtgaattatatctgttgttgaactgataaggtagccagaatgctttctgtcatagaggcaagttgagccatccctggatgcattggtatgttaatatcaaggagagaaccatagtacatatgttcgtctccactgaaatttgtttgtccccatctccttaaaccacacccctgccccattgaatctaggaagtcatagaatttacaaataaatgagaagttcctaataaagaactattgtcagacactcttttatccttggactcaagtgggtgatcataaacttcagaaatacttaattgtatgtcattaattgcaaattaaaacatcaattgcagaaattgcaaattaaaacaacaaagagatatcactacatacctattaggcaaaaattcaaaacaccaataacattacgtctgccaaggatgtggaataacagaaactctcattcatggctggtggcaatgcaaaatggtacagccgctttggaagacaatttggcagtttcttataaactatactcttaccacatcacccagcaatcaagtgtcttgggatttacacaaactagttgaaaacttatgtccacactaagacctgtacgcagatgtttgcagctgctttattcataagtgttaaaccttggaagcaaccaagatgtcctttagtaggtcaatgggcaaataaacagtggtacatccagacaatgaaatactattcagccctagaaagaaatgtgctattgggccatgaaaaggcatgaaagaatcttaaatgcatatcactaagtggaagaaaccaatctgaaagggctacgtactgtatgttttcaactctataacattctggaaaaggcggaactatggagatagtaaaaagattaggagttgccacaggttaatggggagggagggagggatgaataggcagagaacagaggatttttagggcagtgaaactcctctacagcatactgtaatgatggatccacgttaggatacacttgtctaaacctgtagaacatataacgctgagagtgaaccctaatgcaaactataaattctggttgattatgatgtgtaggttaatcaactgtattaattttaccactccagtgggggatgtgaataataggggaggccaggcaagtgtgaaggtagcacagggtatgtgggaaatctcagtggcttcctcttttttctttcttttcttttttttttttttttgagacggagttttgctcttgttgcccaggctggagtgcaatggcacgatctcggcctactgcaacctccgcctcccaggttcaagcaattctcctgcctcagcttccagagtcgttgggattacaggattctgctaccatgcccggctaatttttgcatttgtagtagagactgggtttcgccatgttggccatgctggtttcaaactcctgacctcaggcggcctcggcctcccaaagtgctgggattacaggcatgagccaccgctccgggcctctgtgccttcttcttaattttgctgtgtgtgaacctaaaactgctgtaaaaaatgaagtctactttttttcaagttaattgaatgaaaaatcagtcagtaacagaatgacctcaaaaccaacaaagaaattgcaatgcagagtatttgagtctgacatctaacagaaacactataaaaaggaaagaattactactatccatgagaatgtttgggctttttcaaaatgacaatattttaaaggacgtagttcaacataaatcattagcttattaatatttctatgccattttaggttaatacgcaaactcagtgtgtaatattttaagaattctaacgcaaaatattgagccatctgtaaatctaagctgctttctatgtgactaccaaaaatctactctggtactttttgctgtaagatatttgtaattaattttcccttcacatgtataatctactccattaaacctaagctgtgagacccattattttctaatatccttccaagagatctggaggaaggtactagagtggcgaagggttctgccctggcacccactcgccagcagcgtgaccttgggcactttttccgtctcagtttcctgacctgtaaatagattaaatcaacagtcttatcccataggatttttgaaaaatgatgaaattaattaataattcaaagctcttagaacagtgttgggtacagagtaagcgcctattaatatttattgatattattaatacaattttgacacttaaaagtgagtttggcttgtgtaattattctttttaccctctggtataaaatgtttacccctgatgtggctgacccctatgtgaatagatacctcagcttctctttgtctactctctgcctattttgaaacacattgtgccatcagcaataaaggaaataacttcacagagcattagcagctacttgaacattccaggcgtggtcccagctgaaagcactggcacatgtggtcccccagcccaggattcccttccctcccctttctttttcttttcttttgttttttgttttggtttggttttttgagacggagtcttgctctgtcacccaggctggagtgcagtggtgcaatcttggttcactgcaacctccgcctcctgggttcaagcgattctcctgcctcagcctcccgaggagctgagattacaggcacccaccaccatgcctggctaatttttgcatttttagtagagacagggttttgccatgttggccaggattttctcgaactcctgacctcacgtgatccacccacctcggcctcccaaaatgctgggattactggagtgagccaccgcgcccagcctctttcctctcctttccacacgactccttccctccctccactcaactctctgctcaaatattgtcttctaggagtgacctgtcctagtcccccaattctcttttatactatcaatcagcacctatgattatatttttgcttgttctagtttcttcactagaatgtaagtttccaaagggcaaggactgtatctcattcactctctctcttctgcttccagaacccactgtgattagactagacttccttggcctccctatggaaaagagcaccctcttcttggtctcccttattttgctttgattttctttacagtatgcattatcatattgtttaattatttgtttttcatgtccctaaaacataaacctcatgtctccagtgcctaaaagacgtggcatcaattagacacttaataaatattttattttttgtctatttttattttattaatttttttattttttatttttatgtgtacatagtaggtggatatatttatgggggtacatgagatactttgatacaggcatgcagtgtataataatcacatcagagtaagtagagtatccatcacctcaagcatttatcatttctttgtattaataaatattttaatgaataaagagtacctggtataaataggccctcagcaaatatcccaagtgaatacattttccagaagatgtaatggaaggactaaaggaaggctatatttcccatggtcaatcaaaacataataaaatttttatttaaaaaattccattatatcttacataagacaaattagttctattataaagccatgattgctaagctcagataggccctcaacagctcagaaattctattgtgttgtcaacttattttctcattttccatgacaattattccaaatcttctctcctcttcatccagcccctccttttcctacactcccagtagataaatccatatatcagtaatctatttctgtataacaaagtactccaaaacttagtggtttaaaacattaaaagcatttattatctcacagtttctgttgctcaggaatccaggcataaattagctggatgcctttggctcaagatctctcatcaggtttcagtgaagctgtcagtgaggtctgtgatctcatctgaaggctcaacgggggtaggatcctcttccaagcttactcacatggttgttggtagtgttcagttccttgtaagtggtcagttagaggcttcccttagtttcttgccttgtgagcctttatttaggattgcacatgacatgaaagctggctttcctccaggtgcacatgcacacaagaaagtccaagccagaggccactgtccttagattctctaatagcagaagtggcatctcatcactccaccatgttgtatttgttagaagccagtcactaaggccagaccactcttaaaggagaggattccacagggaatgaacaccaggagacagggcgtcttgtgagatcttagagtctgcctagtgcacaccacttccaattttacagagaaaatagaggccatggcattagaactttctcatcttctacccattcatctgcaccaccctgtcatccttttctgctgtagcagtggagatgcgatacttccacctgtgctttggttcccatttcgatcctttttctcagattattgagagccagtctgagaggggtaaattgattattacccctttgttgcacagtcaacctctcaactcaactgcatcattcccaacagcctttcagtggactcaagactcttcccacagaagcaaaccagcaaaaacacaaacaaaacaaaaccaaacctccacttcccttctctttgcaatatgtatcattttatttatctcctttatttatttttccaaataccctccctcctcaaaagaaaaaaaaagctgtctgttgtcacttgtcagtacactccaagatagcttttggcagaattacttgactaactgttgctggtgttgccggtgacttcatgaaactcaatgaacattttttagtccctgtgttctcttaattttgaatgctggtgactgctccatcctttctgaaaccccctcttcccttactttctaagacaatgctctcctgtttcaattcctgtttctgtagctgccccttctctagtgcttgtgtgggattaccttctcctattcatccctttgacgttggagctcctcggggcttggtcctaagatttcccttctcactctgattttctcttttttggtgaccttacccaagtccttgtttcaactaccatctcaatgcatatgactcaccaactgacttctgtagcccagaattgtgtacatattgacccatttgacatttcttcttgatgtctccaaggtacttcaaactcaatatgttcaaaactgaactcattattttcaccccaaacctgttttttttttcttgtgttctctagtgtatttgtttcctagggcttactgtaacaaataaccacaaactcagtggcttaaaacaacagaaatatattctctcacagttctagagacaggaagtctgaaaccaagtttcaagagttggcctccttccaaaggccagactgaagggaggatccttcctttgttcttccaacttctggtggctccactggttcttgtctggcagccacataacttcaatctgtttctccatcttcatgtggctttctcttctcctcttgtgtttcaaatctccctctgcgtttctcttagaaggactcagaataacccaggatgatctcacctcaaaatccttaattacatctgcaaagacccctttttaaaaataaggccacactcacaggttctgggtggacatgtctcttgggaggccaccgttcaacccagctccatgaatggcacctttatcccgttgttcaggccacaggaacctcataactgtgtttgtgctatcttttcacttgtttccagtatccaaagcatccgcaagttattttaattcctcagcatctcaggtatctgtccacttctccctctttaccactaccttgctcaagctatcatcacctatcacctagagtctgtaacagcctcctgtctatccacagccactcctgcatcctactgtgcattctgcgcactgtagacttgtttcaaaatgcaaatctgatcatgctgccccactctgccttatctccacgtgttcattgttcttaggaaacagacaagtgtaacacagtctatattaaaatcaaaatgaaatgaggataagctgcaaactgtgaagcttttgggatggtaatacataccaggcagggacatacttggtaaaataagaagaatacctacaagaatggatgactttgaacttgacctgcaacaatttaatataatgaccttcctaggtcccttctctactctatagaaaacaaagccactgggaattgatgctaaaaagcatctgtctcccttcaacactcatcatgcagtgaattttgagacggctgggatcccctcagagtatttctgccagcagcatttaaacttgtcaagccttctttctccatcctcatcttttcttataactcttctgctgtggtacctgaatgtgagctgtccaattggtttcaaaatgaacggactccaagttacctacttttatattactgtcactacaaagcagtcctctccaatttatgttctaaaaatagctaagtggagaccttataggtctgatgaaagcaaatctgtagcataaaaaaataaggtgttcaccagtcaatcataaaccaccctctgggcacctataatgtattcagcactgcgccagttgcactcccctttagcaagtgttttggccacaaaacagggagatggagtgcaaagtgattttcacgagtaaaatattccctccataatttctgttcttaggataggcttgattctgttgccataatgaacagccctaaaaccttggcagcttaaaacaataaagggttatttccactcttgctacttatccagcaggttggctgggactttccatcatgctgtcttccctcctagaccagctgatgaagcagccactgttgggacatgcctggtcactatggcggagagggaaatggctcttgaagggcttgcaccagtaattaaatgccctggccaggaagtgagatgtgtctctttgtctgtcagctcactggctagaatatggccccacttaaccataagaggcccagaaaatgcattctatgatcttctcagacagagagagcactggaaatatttgcaaacagcactaaagatgaccacagtctgccctctggtcactaaatatttggactacccttctttccagcaagcaaaatatactcaccaccctccccaagagaaataatccaaaagttccacccaatgagggcatcagacttgaagtcccaaagtgctgggtggggcatgagcatctctactgcaggtccaagaaggcactctccatccagagagagtatctgtccattctaaaattacatctgcaaagaccccttttttaaaataatactcacagattctgggtggacatatctcttgggaggccaccgttcaacccagctccatgaatggcacctttatcccgttgttcaggccacaggaatctcataactgtgttcgtgctatcttttcacttgtttccagtatccaaagcatccacaagttattttaattcctcagcatctcaggtacctgtccacttctccctctttaccactaccttactcaagctatcatcacctttcatctagagtctgtaacagcctcctgtctatccacagccactcctgcatcctactgtgcattctgcacactgtagacttgtttgaaaatacaaaactaagctaaaagccaagttatctgtcccacctcccaagctattgccccactcccaatatacaaaaatagaacagttgtcggctcaccgccatcagcacaccttcagagaggagaaggatggaaggcactcagacactgactctattttcccttctctgtcgtatttattgcagtgaacttttacatagtgtcacgtatctgtcaagaatgcccgtaagcacggtacatatattaattgatttaaccctcactctacagcactatgggaaaggtactgttgtaaaccccatattcagatgagaaaactccaacaacttatttgtgcaaggcccccagctagtccacgctacagctgggcttctgcctgaagtagccgagctccagagtctgctgctaaccattataccacactacctctgcagaatggcttcgtctttagagattcatttacaagtaaaattccaaattaaacttgcaacttaaaagtggaaaaaatgcttctcatgagaagtacatctgaatcttgaagggaacagactggttcctggagttgccagcacccacctctcaatgtgcacttgcaaactccccagtgggttgctgtgtgcacccaggaggagcctgtgggacaggcacacctctcagagttggggtcccactcaaatgtgggatgctcccaggtggctgtgtcagaaaagctccaggtagaaaggactgcagctttgctctactgccagccaaggaaaccacctgtgaacaagtacacactcatgggagtggaaagggaaatggactttctgaatccaacacaggctgtgttttgaagaccgcttcatgagtcatttatgattttatggttgtaatttcccaccacttagacctaataattttgtctatttagacccaaggatcaccacaaaccccattccttatattcataagttctttgtttttattcttctttagatatgtattccattaactaaagcgtgcatttttaagacacacccatgagttcctgactctaaggtttttccctacaacaatctgcaaataatcatttcactatctttaacatctttagtttagttttaattatttatttttatttatttatttattttgagacagggtctcgttctgtcacccagactggagtgcagtggctgaatcatagctcactgcatccttcacctaccaggcccaagcgatcctcccacctcagcctcgtaagtagctgggactacaggtgcatgccactacacctggctaattttttttttttttctggagacgggcatctcactatgttgtccaggctagtctcaaactcctgggctcaagtaatctacgcacctcagcctcccaaagtgctaggataacaggcatgagccaccatgcccagccatcacctttagttttcaagcaaagaaacagacaacctgaaatttcccatagtaagtggatcttatcctgccctgatgcttacagaatttgtcttggtcctgattgctttattctgatttgatttgttttgttatagtaagagaatccttttagtgtataatttccagtcgtccttctattttatctataaatttggttttgttacgcttgttttgtttttctcaggaaaacccactgcgtgtggtatcattactgtcggtttccatctccagcaccggatcacggctgcccccccaacctctgcccctagtacttgatgcgtttcccccagacctcatctccatggcagcagtacagatttgattccaacgggcttctcaggcgggttttttttgttttgttttcttttttcgagactgtcacccaggctggagtgcagtggcgaaatctcagctcactgcaagctccgcctcccgggttcatgccattctcctgcctcagcctccctagtagctgggactacaggcgcctgccaccacgtccggctaattttttgtatttttagtagagacgaggtttcaccgtgttagccaggatggtctcgatctcctgacctcgtgatccgcccaccttggcctcccaaagtgctgggattacaggtgtgagccactgcgcccagcctaggcggttttcattttacaaagatttttccctcaacgaattctccaatatctacttttcccctctttctgttgtttaatgctcttgtctttgaccacttgggtctcttgtttgaactcttgtttcgtaaagatgtcctctttaatttctttgagggattatagaattcataactaaaggtttcttcaattatatgagtcaattcttgttcaggcatatattcttttttttttttttttagttattgataaaaaatggtttgtttgtttgtttgtttgtttgttttttgagatggagtctcactctgtcgcccaggctggagtgcaatggcaagatctccgcctcccagattcaagtgattctgcctcagcctctcaagtagctgggattacaggcacccgccaccacacccacctaatttttgtatttttagtagagacagggtttcaccatgttggccaggctggtcttgaactcctggcctcgagtgatccacatacctcagcctcccaaagtgctgggattacagatgtgagccaccatgcccggccttataaaaatgtttttgatcgcctgtaatcccagcattttgggaggctgaggtaggcggatcacttgaattgtgcctttggtgttgatattagattaatgctggccccaaagaacgaatgatgaagtgtttcctccacttctattttctggaagagattgcgaggaactggtattactttttccttaaatgtttgatagaagtcatcagtgagattttagaccatctatgtgtggtgctttctttccttttttacttgaaggttattgttgattcaatttcatttatgtatatagggctaattaggttatctctttcaccttgtgtgagttttggtagactgtgtctttcctggacatccacatgcacaaaaatgtccctagaaacagatcttatacctttcacaaaacgttttttaatttaattgtttttgagatggagtctcactctgttgcccaggctagagtgcatcaccctgatcacggctcactgcagtctctgctgccagggctgaagcaatccttccaccttaggctcccaagtatctgggaccacagcaatgtgtcacatacctggctaatttgtaaattatttgtagagggtgtcactatgttgccctggctggtctcaaactcctgggttcaagtgattctccagcctcagcttcccaaagtgctgggattacaggcgtgagccacctctcccggcccacaaaaattaaatggatcatagccctaaatgtaaaactataaaacttctagaagaagacatggaagaaaatatctttgacctagaatctggtgataagttttttgttacaacaccaaattcatgtcattgatacatatgtgcacacggctgttgtccagagaggcaagaaacaagagattgaggctgggcatagtggctcatgcctgtaatctcagcactttgggcggcaggggcaggtggatcagctgaggtcaggagtttgagaccagcttggccaacatgacgaaaccccatctctacaaaaaaatacaaaaattagccaggcatggtggcgggtgcctgtaatcccagttactggggaggctgaggcaggaaaatcgcttgaacctgggatgtggaggttgcggtgaactgagattgcacctttgcactccagcctgggtgacaagagtgagactccatctcaaaaaaaaaaaaaaaaaagattgaagcacccctcggagccccttctgtcagctataattccttactctgtctgcctgcacattcattgaagacaaatctgaaaactaaacagaaataaacccttaagctccagaccgtttacataccgaaagcatgttattcaaagcactaggctatcaaatggatgtcacatccaatttgtttaaacagacacaatatgtgaataatggtggacaaatatatcgttggacaagtttagagtcatagatttcttttatcctaaagtcacaaaagctcaagtttaactctaaacaaacaaaactgtgaattgaaaaaaaaaactttggccttactcaagagatttttctgttgaatttcctccaatagtcagtaatggatagattaaatcttcagaaaaataaaaaaagtttgtgtgtttaaagcaagatgatttctttctttgtcaatattttttatttcaataagcttttggagtacaagtagtttttggttacatggatgaattgcatagtggtgaattgtgagattttagtccattcatcacacaagtagtgtacattgtacccaatatgtagtttttagtctcccacctccctcctatcctccccattcttagcctccaaagtctattttacccctctgtatgctgtttcatatccacagcttagctcttcctttttttgtttttttgagatggagtcttgctctgccgcccagactggagtgcagtggtgcattcccggcttactgaaacctccgcctcccaggttcaagcaattctctttcctcagcctcctgagtagctgggattacaggtgtgtgccaccacgcccaaataatttttgtattttttaagcagagatggggcttcaccatgttggccaggctggtctcgaactcctgacttcaagtgatccgcctgcctaccttggccccccaaagtgctgggattacaggcgtgagccaccgtgccgtgccttagctcacacttataagtgagaacatatgatattcagttttctgttcctgagttactacacgtaggacaatggcctccagctccatctaagttgctataaaagacgttattttattcctttttatggctgaatagtattccataatgtatgtatgccacattttctttatccactcattggctgatgggcacttaggttggttccatatctttgcaatggtgaattgggtaaaacaagatgatttttgttaatagagttgaatgttctcatggggagcagttagaaaacgggtcaagtggctgagtgcagtggctcatgcctgtaatcccagagatttgggcaggaggattgcttgagcccaggagttcaagaccagccaaggcaatatagtgagaccccagtttctgcaaaaaaatttaaaaattagcaaggcatggtggtgcatgactgtggtcccagctacttgggaggctgaggtaggaggatcgcttgatcccaggaggttgaggctgcaataagctatgatcatgccactgtactccagcctgggcaacagagcaagaccctgtctcaaaaagaagaataagaataagaataagaaggggaggaggaggactacagagcaaagtctttaaggttttaatggaaaattcttcacctggaatactattcccagtctgattatctttcaaaattaagggcgggatgacagatgcagtatatttcaaggagtcagcaaatatactgcattagtgaagaaagacgccaatgcgtgtatcagtacattggtctcaataaacagattatatccctaatggccttagctgggacacgggaggaaggaattgctgctaagggttttaccttgcaggagggagcaaagtggaaactgatgaactctaagtctcagtagaatttcaccattctattggatcattggtccaacacaactgaatcatcaatcccaaggaaacccagatcaccatttacttgggtcactctcctcccagcagtgagaggttgtctgcaccatctggaaaggtaagatgtagatgtgatgtagtctgctgatgagacttcaacagttgtgctttccagaccactgaaaacccaaagtattatggcggaaccagtatagcagtttcctcttatccacagtttcactctctggggtttcagttacccacagtcaactgcagtttgaaaatattacatggaaaattccagaaataagttttaaaatgtgcactcttctgagtggcatgataaaatctcacattgccatgcttcatcttgcctggacacaaaacagccattagttcagtgtaatcacacagcctacgctacctgccagttagtcacctaggagctgtctgggttctcaaaccaactatctcagtattgccgtgtttgtgttcaggtagcccttattttagtaaataatggccctaaagtacaagaggggtgatgctggcatattgttataattgttctattttattatgagttattgttattaacatattactgcaactaatttataagttaaacattatcataggcatgtatgtataggaaagcatactatctgtagggtttgataatatccacaattccaagcatccattgggggtcttggaatatctcccttgcagataagaggaaactactgtacctggcacaaaaaccttcttttgaaaattaaactaaaggcatgctgtattactctgttctcatgctgccaataaagacttaccagagactgggtaatttataaaggaaagaggtttaattgactcacagctctgcagggctggggaggcctcagaaaacttacaatcatggcagaaggggaagcaaacatgtccttcttcacatggcagcagcaaggagaagtgcagaacaaagtaggggaaagctccttaaaaaaccatcagatctcatgagaattcacgatcacaagaacagcagcatgggagtaactgcccctgtgattcggttacctcccgccgggtacctcccacaacatatggggattatgggaacgatgattcaagatgagatttgtgtagggacacagccaaaccatatcacatgcacaaccttttacttaggtgagttctgttgtatccaaagctattcaaggtgattattactagtaccatgccttctgtgttttctggaccgaattcacactagaatcctcttactcagcatagagccaatttcagcattgtcctgcctcagccacttccaatactgcatatagaaatacccatgcaccctgaagagcctttcacaaggctctctcctgatacttaatgacacagggccattttctcttcattaaatcatgattttaaaacatacaacaaaatgtttaaaaccaaaacagggcgggcgcagtggctcatgcctgtaatcccagcactttcagagactgagccaggtggatcacttgaggtcaggaatttgagaccagcctggccaacatagtgaaaccccatatctactaaaaatataaaaaattagccaggtgtggtggcgagcaccaggctgaggcaggagaatcccttgaactgggaggcgaaggttgcaatgagctgagatcacgccactgcactccagcctgggcgacagagccagactttacctcaaaaaaaaaaaaaaaaagcaaaacatatgacaataaaacctgataatttgctaaacatagaattactagatctgatatatcataaaacattaccacaaccataagcagaacagagcaaagtaccatgatggttacttttatgtgtcaactttgaattcctggtttataaaatgatttatagctttgcattcaccaaataggtaaaactacacttttaagatgacaaactgggccaggtctggtggctcacacctgtaatgccaataattagatgggaggatcacttaaggccaggagtttgagaccagcctgggcaacatagtgagaccctgtttctacaaaaaataaaaaattagctgggtgtggtggcatgcacccgtagtcccagctactcaggaagctgagatgggggattgcttgagcctaggaggccaaggatgcagtgagttatgattatgccactgccctccagcctgggccacagagtgataccctgtctcaaataaaatttaacaattttaaaaactagctgggtgtgatggcacatgcctgtagtctcagctacttgggaggctgaggtgggagaatctcctgaactcaggagtttgaagttaaagtgagtcatgattgcaccacttcactccagcctgggccacagagcaagacctcatttcaaaaaaaaaaaaaagacaaactgacttggtaagactacttaaaattaagaagaccttcctttttggccaacgttccaacatggtacataaaaaaaaagacctcggttgtaagttttgtgggggtttttttggtataaaattatcctaaatttctagtctttatttaagatgaacataaattggctctatagagttttcactgaataattaactaaggattcagcttctcatttgtagtaagattgaaaaagataaataaatcaggcctgtgaccaatttaccccaaaatacaatttcttcattataaagaacaaaacaggaaagaagttaaagaactcccttaataaaagcactgaactgccacaagtctaatagactattagagcctagatgaagatggaaaattacctaataaaaatcgcaatttgcatagatttgccccataattacaaaacttattaagttccattttcccagatactataatggggttcacctttcatttaatgcaattcgtgatcactgactacttcaggcagcaaacgttggtaaaatcaaatccataattacatttttggttcatatgtgaaagactgaaatattcactaactgatctatatactatttgttaaaattaagtagaatgaaaaattctgaagagggttttactcaaatctttaactaccgttttcaagcctttcgctccattggctctgtccaaagcgaggttatgaaggttacaaaaccgaaagaaaacacttgctttgggtctatattcattccatctagttcaatacagtacatgtttattaaaatcgtcccatatgtgtggtcctgtctgaattaagcaggtgggataactgccaaatgtctgttttatcctgaatcctgtaagtagcaagtgccttttggttctgtggcagactgagaccagtaaggccgccagtgaatcatgcctccctgggtccactgtcttttcagtgtaattttgtgacccctcccatcaagatgatgggtctatttccccatcacctgaatctaggctgggcttgtgacttgctttggccaatgaaatgccacagatgttcagctgggctatgagaaggcctatagcttcctctttcccctcttgcaatattcctgctgtcaaggaagcaagactgggctagacccagtttcaggagaggcccagcagatagcagacacgtgaggaggccatcatggattcttgagctgccagatgaccacagtaacatgagtaaccccagaccagagcaacagaaaacccgcccagctgagcccagccaacccatggaaataatattacataaataaattaatgaaaacatatttgttgtttttaagcaccccaagtttggggatggcttaagcagccctgggtaactgacaccactgacaccatctccaaatccccagtttcccagaagagagtctctactgttctggaaaccacaatagtgggtgtgactgtggggaatggtccctgaaagcacaaatgtgtcttcttttcattttttcactagtagttattgctactagttcaaatgcactattcctgttatcttcatcagtcacaataacatttagggttatagaagatttctaggtagaaataacctacatatggagatacatgcagaacgaatttcagtgtgttccttactccagtgaagtcttgcaaagtggtcttaaagggcctccacatctgcacacttccaccttggctgtaattgtgtagcagactcccaaatacacaagttgattgatagtttgattggttaacttgttctgaagtcatatccattgatatttgtttgaatgtcattcttggagcgcagagaggaaaggtcctgtggaaggttgcgcactgtggggctggctccccagtccaaccaatgaggactcccacttccatgccccaataccttttttttttttagagacagggtcttgctctgtcacccaggctggaccacagtggtgtgatcctagttcactgcaatctcaacctccgaggctcaaatgatcctcctgcctcagcctcccaagtagctaggactacaggcatgtgccaccatgcccagttaattttttaatttcttttttgtagagatggggtctctccatgttgcccaggctggtctcaaactcctgagctcaagcgatcctcccacctcagcctcccaaagcagttgggattacaggtgtgagccaccgcacctggccagtctccctcctcttaactgcttcctgccttcccttcccaccagacttggtttaatctctctaggccctgagttccaaaacccatctcagattgggttaaagggggaattcactctaactgtcagaaaagttatcaaaaacttgagaactgaccaaagagatttgccgggggttctttcagggcaatcctggttttgcctctttgattgactttccgttgcctgagttgttttacatctctgcaggggcagaggtgaatttcgagatttttttggtaggtatgcaaataactactgaacagtagaaaagataaccccagctacaggtttgtggactgcaggagattagccagtttgtgtgaccctgccctaatatccctttactaagttgtctaaaatacccagtccctcaaatgcactaaaccacttttagcatcttcctgaactccacattaattaatgagtccaagacaatctttggcacttcctttttttattgctgagtcatcttatttaatcttttgtgaattataccttaacataaggcccaaaaagggtttcagagaagccaaagactggaaggactcagcctcctaaagcagccaccacctcccgctgctccgggccacgaagtctctctctctctctcttttctgtctctctgtctctctgtatgtctctctgtgtctctctgtttctctgtccctccatctctgtctctcttcgcctttgtctttgtctctatctctctgtttctttctctctgtctctctctgtttcggtctctgtctgtctctgtctctgtatctctgtgtctttgtctctctgtctccctctttgtttctctctgtctctgtctctttctgtctctgtctctctttgtgtctctctgtctgtctctctctgtccctgtctctgtttctctctctctccattgatcccatgcctgcctctgccgcactctcccctggacagcctggccctctccccaacaccctaaggggaaatggccacccacagctctccagtttgcatattctcgatttagaggaatggcccagatggaccagagtccttaaatccctttccaaggaagagactgaggtcactccaacatgcttccagcctctgcttcttgaccactggaagataaggacaaggatgtgaagtttctgcatttgtatcaccaaaaacatcactggagttcctagggactgtggtggccaccccgagatttccctgcccttggtgcctggtggagagctgagccctggagaggatggaggctgggaagggggctgtggtgttgtgatggggtcagtctccctcttacctccggagccacacaccctttgccattcaccactgttttctcttttttgttcttgattaacattgccaaaatttaagtcattttacattttttcaaaagagccattccttatattaaaaattctactctaggccgggcacagtggctcacacctgtaatcccagcactttgggaggccaaggcaggtggatcacctgaagtcagtagtttgagaccagcctggccagcatggtgaaacccctactaaaaatacaaaaattagctgggcgtggtagcgcacgcctgcaatcccagctacttaggaggctgaggcatgagaattgcttgaagctgggagatggaggttgcagtgagcgaagattgtgccaccacactccagcctgggcaatggagtgagactcttgtctcaaaaaaataaaaataaaaataaattctactctagttcttttatctaatttattgtttcctgattttgtctccatttttctttttcttagctttattgtattggttttctagcttttaagggatgctaagttcatttctttttaccctctcttgcctaataatggaaacacttcattcccatcctcagagcaaaggttcagctgtgtctctcataagttttggagcttcctgttttccaagttgctaacttctaaggatgctggaactgttattatatttgtgtttctttctggacagaaggggcacctaaaaggcttgtttaacttccagggtttgagtgtttaaaatcgaccttttgtagctgatttctagttttgttacattgtcgtcagaaaatgtgccttgtggcccatcctgctgcatggaactaaattttcttgttgtgcctatttcatgggttcttggataagatgatcatacacaggccagaacgttccatggctctacgtcaatcttattacaatgcctctaactcttttgtttttcctatttgaccaaagatggagaatggtgtgttaaaccatctcattatgattttccttaggataatttattcttgaatttcttctagtttgctttatacatttcaacctcagtaatttgctacatctatgttattgatatcaacatcttcattgtcaattatagtttctgtaccgttaatattctgacctgaggccaggtgtggtgactcactcctgtaattctagttcttggagagtgccaggtccaacccgcagaccctgctgaacgaaggatgaacaaatgcactcagacacagatatccagtgaaagagcaggctaggggaccgggccacccacagacaccgaggagggtgctataaagagtcagcagctgtggccctcacaagctggccctgtgagcatttattcagcacagatttaatgacaaaggctttgagtcaacacacttgttggtaattaacatggttgccttccccagagagagcagtcctgcacatggatgattaaaggccaggttccaaggcctaagtaaactaacttatccagatcaatttctttacatccccttgctatctaacctaagttcttaagagaattcagctgccttcagccaaattttctttcgaagctttgcaaacccctggccttccaagaaggtttgcatcttctacaattttgccaccaccccaatctcctacaggggaggtcaaggcaggaggattgcttgagcccaggagtttgacatcaacctaggctacatggtgaaaccccatctctacaaaaagtacaaaagttagctgggcatggtggcacacacttgtagtcccaactactcaggaggctgaagtgggaggatcacttgaggtcgaggctacagtgagctgtgattgcaccatcacaccactgcactccagcctgggtgacagagaccctgtgtcaaaaaaaaaaactttgacctaaatctatatcgcatattaataacataagcccagtttaaaaaactgcatctatctaatattcattcattcattcattcaaatatttgagcacttgccacatgccaggcactatgcctggtgctggggacagagtgttgaatggaaccacaatgttcctgtcttcacagagctcctagtgaaggacagagaccatgatcaaatttagcaacaatgtagcaacaatgtaagactcgcagtctcacacacacacacacacacacacacacacaagcatccatgtaccattatatgctgtcatgcacactttcacacatgcacacagccatacactgccacacacatacttgcacacagccatacactgccacacacatacttgcacacattcatctttagccagtaaaaatatgcctggaggatggattatgaggaagggaattgtggggctgaaagtcatgggcatttaaaattgaccagaactgccacattgacactctccaaagacagtacaattattgtaagtaccaacagagcaggaacagagcaggaatgcttctctcccacacctttataaacacagaacttttgtgtgtgtgtgtgtgtgtgtgtgtgtgtgatagagtctcactctgtcacccaggctggagtgcagtggtgtgatctctgctgactgaaacctggatcacttgaggccaggagtttgagaccagcctgaccaacatggtgaaactctgtctctactaaaaatacaaaaactggtggggcacggtggctcacgcctgtaatcccagcacaggagggaggccagggcaggcagatcacctgaggtcaggagttccagaccagatggccaacatggggaaaccccatctctactaaaaatacaaaaattagccagatgtgggtggcatgcacctgtagtcccagctactcaggaggctgagggaggagaatcagtggaacccaggagtcagaggttgcagtgagccgagattgtgccactatactccagcctgggcgacagagtgagactccatctgaaaatataaataaaaaaataaaaatacaaaaattagccgggcgtggtggcgcacgcctctagtcccaactacttgggaggctgaggcatgagaatcgcttgaacccgggaggcagtggttgcagtgagccaagatcatgccactgcactccagcctgggcaacagagtgagactcagtctcaaagaaaaaaatatatatctgattgttaaaaacagcccagcatctcctcctgtcgctcttgctccctttctgtccagttgacacacctgctcccccatcacctctgcagtgagtggaagcttcctgaggccttaccagaagcagatgccagtgccatgcttcctatacagcttgcaaaactgcgaaccaaataaaccccttttctttataaattacccagcctcaagtatttctttgcagcagtgcaagacagacttaagacactggtccagtaggtgacggtaacatttttgttggtttattttatatttttttaactcataaacctaagcacctttcaacctagatttgtcttatctatttttagaagccctttacacatgctgagtattaacaccttgtcatatgtcacaaatatgtttagctatattgatggcgtggtgtgtatataagttataaaatttgaggtgccctctttttttcttccgttacctctagatttctttccacctctcagatgatgaaaatatgccccccgttttccgctgctactttagcaattcttttacttttgggtttttagcccagccagacttttgttaataataggaaggcagagacaagatttctcgccaaatggacaggcaattgtcctggcaacatttattgactaatcaatgaggcagttcgccaaaagtaaaatactattaccagagcaagggtagagaagagggatgttggatagtggaaaaaatgaacgtccattcttctgcataaaattttccttccaaatctcaaatctcagagcctatgttctttcttttcttttcttttcttttctttttctttttctttttttgaggcagagtctcgctctgtcacccaggctggagtacagtggctcgatcttggctcactgcaacctctgcctcccaggttcaagtgcttctcctgcctcagcctcccgagtagctgaggttacaggtgcccaccaccacacctggctaattttgtatttttagaagagacagggttttgccatgttggccaggctggtctcaaactcctgaccttaggtgatctgtctgcctcagcttcccaaagtgctgggattacaggcgtgagccaccatgcctggcctcggagcctataatctgagagaaaactgtaactatgtggtaatgagccgcatccagccaataaagagcttgctttatttagagaagacagactttgtttcatggaggaggccaggcttccgaactgagtccgggatgcaaggaggtggccacccagtcatgagcagaggcgctggttctcaggaaaaaaaataccccgggagtgaagggggccaatacagcatgtgtgctgtgaggaactctccatggtgaccaatttaatacaaagccaaatcctatgttttgatgtcttgaatagcttgccttgaagagaaaggttgccatggtaactctttcaaagacaatgtcttcaccatagaccagttgtttaacctgcagagaacaatctttttctctgtgatgacaattaaaatccaacaaggaggttgaactcagcagcaccagtatggtctccacagggagaccttcactaaaaatggcaaaacaggccaggcgtggtggttcacacctgcaatcccagcacactgggaggctgaggtaggaggattgcttaagcccaggagtttgagactgcagtgagctatgattgcatcactccactccagcctgggcaccagagcaagaccgtgtctcaaaaaatcaaaacaaaacaaaataataagacactccagtgaacagtattggcaagatcaaaaacattttttatagatgacataaatgctgtattggattctttttgaatcagcctctagacaggtcaggaaagaacaattacaagagggaaaatgtaaatgtttttaccttgaacatatgaaaaagtaaaaagtccacctaacagaaattgggaaatgtaggtagaaggagagggaaggcaagttagagggggttgatgtcttccctccccatggggacaggtttagagatgctactgaacatcaatggaacaagacacagaggttgaagtgagttatttgatgttgcaaagtcagccaccatcaccaacaccaacaaaatataaacaggaagagggaagagggtgtattagtctgttttcacagtgctataaagaaatacccgagactgggtaatttataaaggaaagaggtttaattgactcacagttaaacatgactggggaggcctcaggaaacttacaatcatggtggaagggaagggggaagcaaggtccttcttcacatggcagcaggagagagaagtgcaagcaggggaaatggcagatgcttataaaaccatcagatctcttgagaactcactcgctttcttgagagcagcatgggagaaaccacctccatgatccagtcacttcctactaggtccctcccttgacatgtggggattatggggattaagattcaagatgagattgtggggacacagaaccaaaccatatcagaagggaatggggtgagagcacgcaatcttcatttttcacattagacagtgttttgagaacccccagtgaaatcgaggttatagcaccagagtggctagcaaccctgccctagggagatgcagaggagctgggcgtgggtgtctagagtgtgcgtctctttttaaaaaatttttttattatttttattaagttgagatggtgtctcgctatgttgcctagggtggtcacgaactcctggcctcaagccatcctcccacctcagcctcccaaagtgctgggactacaggcgagtcatcatgcccagcctagactgtgcctttcatgggatacttcttttacccagtggacagtaaccagaaggtcctttgcatgggaagcttgtttacccagcggacagtgaccagaatgttctttgcatgggaagcttgtttacccagcggatactgaccagaagttcctttgcatgggaagcttgtttaccagcggatactgaccagaagttcctttgcatgggaagcttgtttaccagcggatactgaccagaagttcctttgcatgggaagcttgtttacccagcagagtgtgaccagaaggttttttgcatgggaagcctatttacccagcggacaatgaccagaaggtcctttgcatgggaagcttgtttcctgaggcctcccaaccagtggacgtcctggtggctgttgtctgagctctgtccagcttatgcctgcctgaccattgctctggcactgggagtccaacctcatgttcccagcatcccggggaaacgcagcctggggaagcccccggttcttcagctggaaggtgcaaattccatccaccaccagggtagggagcagaccctaggcaaggagggcacaatatgtgggagggcaggtcacacagaccggaatgaagagtcaggcagagagaggagagagagagatgcggctcacggtgtatacataagggaatggagcatgggtcactttaagttcttgggaaaatgtctgaatgctccacttatttatttttatttcaagagtttttgggccaggcgctgtggctcacgcctgtaatctcagcactttgggaggccaaggtgggcagatcacttgaggtcagtagttcaagaccagcctggccaacatgatacaaccctgtctctactaaaaatacaaaaattagccaggcatagtgggcacatgcctgtaatcccagctacttgggaagctgaagcaggatactcgcttgaacccggggtggggcgtggcaggggggtagaggttgtagtgagctgagatgacgccactgcactccagcctccagagcgacagagcgagactccgtctcaaaaaaaaaaagtttttggggtacaggtggtttttggttttggttacatgaataagtactttagaggtgattcctgagattttagtccacacagtgtacactgtacccaatatgtagtcctttatccctcaccccctcccaacttccccatccctgagtccccaaaatccattatatcactctcatgcctttgcatcttcatagcttagctcccacttctaagtgagaacatgtggtatttggttttccattcctgagttacttcatttaggttaaatagcctccagctcgatccaggttgctgcaaaagacatttttcattcctttttatgtctgagtggttgaatggtgtatttaaaggaagcaacgagagaaagtggggaggcagtctgctgggcaggggagagatgcctctaagttcttatctctggccactggcttgagccatttgggtgtggcagtcaacttcgaatgcccagggagcaacttttgctgtgttctttcattgcggggagtcagtctatggaacagagccacagctgtattaattacagttgtgacataaacactagaaaaactagcacatggcataaagtgactcagagaggaaaagagagagagacaggggaccatttctcttatgagcaattctctattacttaagtttcaaccatatgcatacattgataaaacaattttaatgtttcactgaagaccactgcatgacatctaaacatgtctgataatactcagtaggtgaatttaccagttttaaaaagacttgatcaacacgaaggaaaggggtaacaacagactgagagacgaaacagcatctccatcgtgggccatgtacggcccttacctggaaactgctggcaacagacaaactgaaaaaccactagagtcatctgagcacttgctgatttcacactaaggcattgtaaagagcaggagattgatgggatagtggttctctgaatttgtttttttctttttttaagagtcgtggtcttggccaggcgcagtggttcacacctgtaatcccagcactttgggaggccaatgtgggcaggttgcctgagatcaggagtttgagaccatcctggccaacatgctgaaatcctgtctctactaaaaatacaaaaattagccagatgtggtggtgcatgcctgtgatcccagctactagggaggctgaggcacaagaattgcttgagcctgggaggcggaggttgcggtgaaccaagattgtgccactgcactccagcctgggcaacacaatgagaccctgacacacacacacacacacacacacacacaaaagagtcatgatcgtgctctgtcacccaggctagagtgcggtggcatgatcatagctcactgcagcctcaaactcctaggctcaagtgatcctcctgccttagcctcctgagcgactgggactacaggcatgttccaccatacccggctaatttttaaatttttggtagagatgagggtctcactatgttgcccaggctggtctcaaactcctagcatcaagtgatcctcccctcttggcctcccaaagtgctgggattataggcatgagctaccatgcctggcccaattttttttaactagtccttattttttaagaatacgtactgaaatatttacagatgagatggtacgatgtctgggattacttccaagccatccagtgggaggagggtaaggatggaaccaaactggctgtaagctgataatgtggggttcatcatactattttctcgacttgtgtctatgtgtgaaatttcctatattaaagacagacacagaataggaatgtatacactaaatggcaacagtatacattttgacatcttggatttttaaaaattaaatacacgctgttcagtttttaagtaaagccctaatttgggcagattctccccttctaagggatttgaacacaaatttctgaaccctagggttggagtatgagtattgctggctccttcgtgttttttgacagggagaaaccaacagtgcacaaaatggtgactgtcaccagacactgaatctgccagcacctggatcctggacttcctagcctccagaacagtgaggaataaattcattgtgttctgcaaagctccaaggacctcctgaaatagtcctgagtccctctcagcctggtgtagcacccaattcagttgtctggctggtttgtggtgccaggccaagacaccactttgggtggggaggagaaagagaatgaagtaggaggggagggcgtgagccatgatttgggagagagaatcagacagtcagccagaaagacgcatacagtaggcacttaataaatgtttgcctggatagacaggaaccgaagtacaggcgctgaagaaaggcagtaactttttcccatggatgggagttctgctgcaaaaggacataataaaaatcgacatgataattgctgtgatctgaaagtgtgtgtcctcctccaaatttgcatgttgaaatcctaactcccaaagtgatggtatgaggaggtggggcttatttgatctggagggtggaggccgctaggaaactggctctgactgataaggccttcaggattgggatgagtgcctttataaaagagaccacagcctgtaatcccagcactttgggaggctgagatgggcggattgcttgaggtcaggagttccagaccagcctggccaacacagtgaaaccctgtctctaccaaaaaatacaaaaattagccaggtgtggtggcacgtgcctgtagtcccagctactcaggaggctgaggcaggagaatcacttgaacctgggaggcagaggttgcagtgagcagagatcagccaatgcactccagcctgggtgacagagcaagactctgcctcggaaaaaaaaaaagaaagagagagagagagatcatagagatccagctagcctgtttcataatatgaaggcacagcaggaaggcgccacccatgaggaagctgaccatcaccagatactgaatctgccagcatcttgatcttggacttcccaggctccagaaccaataaatttctgttgatagtacccagtttatggtatttttatagcagcctgaacagactaatacagtttcctacaaaaaaaccaaggattttgtaatgggaatgaatgcgaagataccaaatattcctgtgctcttctgagagtcattcttgctcaaagagcctgaagagtttccatgactcttgtctaaacttatttctaatccctgattgtttatcttttaggatttccatattatttttctactgcatttgtttgttgatttgacagtgtgaccacagcagcctagccacatgtcaaaaaggcagccacaatcataagtcaaaggaatttaagaaacagccaggcacggtggctcacgcctgtaatcctagcactttggaaggctgaggcaggtgactcacttaaggtcagctaatcgcctgaggttaggcgttggaaactagcctggccaacatggtgaacccccgtctctactaaaaatacaaaaactagccgggcgtggtggcgggtgcctgtaatcccagctactcaggaggctgaggcaggagaatcgcttgaacctaggaggcagaggtttcagtgagcccagattgtgccactgcactctaacctgggagacagagtgagactctgtctcaaaaaaaaaaaaaaaaaaaagtgaggccaggtgcggtggctcactcctataatctcagtactttgggaggccaaggcaggcagatcgctcgcaagtttgagaccaacctgggcaacacgatgaaaccccatctctataaaaaatacaaaaattagttgggcatggtggtacatctttagtcccagctacttgggagactgaggtgggaagattgcttaagcttgggaggcggaggttgtagtgagctgagattgtgccactgatctccagcctgggcaacagagccagaccttgactcaaacaccaaaaaaaaaaaaaaaaaaaaagaaagaaaatgtgacttttttttttttttttgagatgaagtctcactctgtcgcccaggctggagtgcagtggcacgatctcggctcactgcaacctctacatcccaggttcaagcgattctcctgccttagcctcctgagtagctgggattacaggcatgtgcccccacgcctggttaatttttgtttttttagtagagacggggtttcaccatgttggtcaggctggtctcgaactcctggccttgtgagatccgcctgcctcagcctcccaaattgataagattacaggcgtgaaccaccgcgcccggccaatgtgacttataagtaatcggaaaaggcattgcagacatggcaagattctgtgtaaattgctttagctgaaattagacactcaattaggcacttaattaccctgaagccttattgatgccctattagaagtggccccacccactagaatcaagtggagatgacaggtcggctccctgtagtggtgccagaagcaagactgatacagcaaccacaggcagcattcaatccacagctcccaggcctcctggcctcctgttttcctgatcacaccactcactgcacgagcattttccatctgagatcctctcaaatctgaattttaaatgtgggtttcctttcaggactgcaagcagacagtcactctgcatggccccactgtaaggatgtcaacctttagcggcagcttggaccttcaaggggtcatcagcagagccgcactgatcagctgctcggagtccagctctgactgatgaagtcagctaatggtccacgcgccccttctcattaataactcacctccatgggcagctgggtccaggtctctgcccctggtatcacattatatgataattatattcagattagtttttcatatcctttggacagagacatgctaatttgggtacttagacattaaaatcttataaagttctcgagtgattttaagtccaagttcttaaatgggatgccttattggaaagaaaacatgtagctatcagcttcctatcaagaactgactcctggccaggtgcagtggctcacatctgtaatcctaacactttgggaggctggggtgggagaatcacttgaggccaggagtttgagaccagcctaagcaacacagtgagacgctgtctctacccccgcaaaaaaaatgtaattaaaaacaaaatagtcaggcatagtggtgcctgcctgtagttccagctacttggaagaatggggcaagaggattgcttgagcctaggagttcaaggatgcaatgagctgtgattgtgccactgcactccagcctgggtgacagagcgagactctgtcccttaaaaaaatgccgattcctgggtagataggcaactgactttgatcagacgctctcctatgggtggggatgctgtctcacaacagattcagcaccatattttattttatttttttgagacggagttttactcttgttgcccaggttggagtgcagtcgcgtgatctgggctcactgcaacctctacctgccgggttcaagtgattcgcctgcctcagcctcccaagtagttggaattacaggcacaagccaccacccctggataatttttttttttttttgtatttttagtagagagtttcaccatgttggccaggctggtctcaaactcctgacctcaagtgatccacccgccgcagcctcccaaagtgctgggattatgggtgtgagccatcacgcccggcccagcatcttattttaaacggtccatcagaggaagacaaatactatatgatctcacctacatgaggaatcaagaaaagtcaaactcatagaaacagagagtaaaatggtggcttgcaggggctggggtgggagatatggggagacgccaaagggccgcaaaccttcagttacaagatgaatccattctggagaccaaccagacagcatggcaaggacagttcataataacatactgcatccctgaaatttgctaagagagtagatcctagatgttctcacgacacacacacacaaatgataaccaggttaggtgacagatcggttaactaacttagctgtggtcatcatttcacaatacagctgactcttgaacaacataggtttgaactgcatgggcccacttacacgaagattttctttattttattttattttattattttattttattttatttttcgagacggagtctctctctttggagtgccatggcacgaccttggttcactgcacctccgcctcccaggttcaagtgactctcctgcctcagcctcctgagtagctgggattacaggcgcctgccaccacactcggctaatttttgtatttttagtcgagacggggtttagccacgttggccaggctggtctcgaaccaggatcacctgacctcagatgatccacccaccccagtctcccagggtgctgggattacagctgtgaaccactgcgcccagcctacaggaagattttcttctgcctctgctacccaagctagcaagaccaacccctcttcttcctcctcctcctactcggcctactcaacatgaagacaaggatgaagacctttgtgatgaactacttccacttcatgaatagtaaatgtattttccttatgattttcttaataacatgttcttttctctagtgtacattattgtaagaatatgatatatgatacgcacacaaaatatgcattaaccatttatgtgattagtaaggcttctggtaaacagtaggctattagtagctttgtggtttctgctttttgttttgtttttgtgtttttttggagacagagtctcgctccatcagccaggctaaagtgcagtggcgcaatctcagctcactgcaacctcggcctctggagttcaagcaattctcctgcttcagcctcccaagtatctgggatcacaggtgcgcacccctgtgcccagataatttttgtatttttagtttcaccatgttggccaggctggtctccaactcctgacctcagctaatccacctgccttagcttcctaaagtgctgggattacagatgtgagccaccgcacccagcctgcttcagttaagttctgcctggtgatcattcttgtcaattctcattgcatttccctcacttaatggagaccatgtttgtgtctgtctctgtttcagtctcggtctctctttctgtctctctccctcaccctttctctccatgaattcccataggctgaagttattccaccactgaagtcttaactccagcgtccactctccaagcactgcctcctgatccccagctcccattcccacttgtgctccattcacctccatctcccctactctgccctaggaggacttcccccacctcctggctctgctctcttccctgccagacgcggacagccactagaagtccgtggtccccagccccagatgggccttcagcacaagcatcccttccactgccatcccatacgccaggggagcagactgtggctcttgagatctgtgattagtcaaaactctttcagggccagttgcagtggctcacgcctttaatcccagcactctgggaggccaagacgggtggatcacctacggtcaggagtttgagaccagcctggccaacatggtgaaaccccatctctactaaaaatacacaaattagctgggcatggtggcatgcacctgtagtcccagctacttgggaggttgaggcaggagaatcgcttgaacccgggaggcagaggttgcaatgggccaagatcgcaccattgcacttcagcctgggtgacagaatgagactccataaaaaaaaaaacaaaaaaaaaacctttttaggataaattttctcatgaaaaaaatttgtatatgtaagcttgaaagtcaactgacagtaggcagatagtagtttatgagccataaggcatctcagccccatcaataataagagtgtacttccgacaccaaaatagatatagagaccaatgtcattgggagctagaattctgcgtgtggtttgtgattaacttggtggacgaaattctcctttaaagtcgtaaagttccatgaagtctcagtctcaaggtcaggaatcttggtatcctaattttctgtagcgagctgtgggggaagcggcattctgttcctacatgcattgttctaccagcaaaaatccagtcttagcaaacacaaaatatttctttttcttccttgtttttttgagacagtcttgctctgtctctgatattacgatgtcttttcttaaaaataaaataacaaaatattcttatgctataggtttgacttttgtgcatagggtcacacctctattagcccacttaaaagaaatagaagtcgaaaaaaaaaaaaaactagaaaagaaaaaggtgaatgtggccgggcacggtggctcatgcctgtaatcccagcactttgggaggccgaggcaggcggatcacctgaggtcaggagtttgagaccttcctggccaacatggcgaaactccgtctctactaaaaatacaaaaattagccaggcatggtgtcgccctcctatcatcccagctactcgggaggctgaggcaagagaatcacttgaaccccaggaggcagaggttacagtgagctgagatcgggccactgtactccagcctgggtgacagagtgagactccgtctcaaaaaaaaaaaaaaaaaaaaagaaaagagaaagaaagaaaagaaacaggtgaatggaaactacccaacccagttctggcaggactgttaacggcccagacccttcaggaatgaaggtttgggtcacatcacaaggccagaagtcaccggctgagattcttgctgaggaccaagagagtggaaagagtagtggaagaaactatctaaacaccagcttgagccacacggctagtggaaacaaacaatcaaaagaacaacacacaacacaaaacaatttaaggcctatagttagcagagtatgttttccttgccttgaaatgaatgcatatatgatatttccctttctcattccccccgccttttttgggggcgggggtggggggacagagtttcgctctgtcacccaggctgaagtgcagtggcacgatctcagctcactgcaacctccatctcccaggttaagcaattctcgtgcctcagcctcatgattagctgggattacaggcttgcaccatcacgcccggctaatttttattttttttaatttttttttatttttaggtagagacagggttttaccatgttgaccaggctggtctcaaactgttgagctcaggtgatccattcacctcggtccaaagtgctgggattacaggcgtgagccaccatggttcccttcttatctaacataagatatactgacagtagttaaccctatatctcagcatttaagttacaggtttaagttaaggtatatgtttgggttctatgagggctagttgcattatgttaggtgaaagcatgattctgccactgttttcatttggaacttaagggtggggaaaggaggtgactatgcatgccaaggtgaccaaggggtggagtctgccagattgcaacttttcaccttggcaccagcattccagtctaaggctaggaaatccattgcctgcatggtctggccgttagggtcggccaagagctgaactcgcgtgagatttgaaagggtgaaagcgaaactgaagcccttactcttggaacgtccttttggtgggattcttcctaattttagaccccaccaaccaacagtgggctcagtccagtgcagagagcagggctgcagttccggcaaagcatggcttacgcagacctccccttcatgcaccagcttccagaatgttcccacaaactctgctctccccagccgcacctgtgtttctggctgtcatggttagttagaggctttcgacacccacattccagaactttaatttcctacattggtataaatctagtaagccgcgtgttcccataaaacataatttttttttttttgagacagagtctcgctctatcgcccaggctagagtgcaatggcgtgatctcggctcactgcaacctccgcctcccgggttcaagcgattctcctgcctcagcctcccgaggagctatgattacaggcatgcgccaccatgcctggctaattttttatttttagtagagatggagtttcgccatgttggccaggctggtctcgaactcctgacttcaggcagtccgcctgccttcaggtggttctgggattacaggcgtgagccactgcgcctggcccataaaacataattaaataataaagaggcaaaagagatgaacaaacagttcacaaaaaaggaactacagatggttcttagacaaatgaaaagatgttcaacctcatttattaccacaaagcagatgaaaatttccttcagacacatttttcatctgtcaaactggcaaaaatccataggtttcctggcaccctctgtggacaacgctgtggggaagctatcttcctacagtgcgggtggaaaagtccatgaaagagtcctacagagggtgcagttagcgacagctgtcacgtttacataagtggatgagtgacttcagcaatccaactttgcttttttattctacagatatgcataccagcacacgttaaaaggtatctatctgttcaaggatttttttttttttttgagaggggtctcactcttgcccaggctggagtgcagtggtgcaatctcagctcactgcaacctccccatcctgggttcaagtgattctcctgcctcagcctcctgagtagctgggattacaggcgtgtgccaccatgcccggctacttttttgtatttttagtagagaagtagagatggggtttcaccatgttggtcaggctggtcttgaaccctgacctcgtgatccacccacctcggcctcccaaagtgctgggattacaggtgtgagccaccgcacccagcctcaaggatatttactgcaggctttttactactgtttgcagtagtaaaaaccaagaaacaatgtaacaattgtcaaaaggtaaataaattcggctgggcatgatagcacacaattgttccagctacctgggaggccaaggtgggaggatgccttgagcctaggagctcaaggccagcctgggcaacatagcaagaccctgcctcttttttaaaaagttaaataaattggctgggcatggtagctcatgcctgtaatcccagcactttgggaggctgaggcaggggaatcacctgagctcaggagttcgagaccagcctgggcaacatggaaaaacctcgtctctactaaaaatacaaaaaattagccaggtgcggtggcaggagcctgtagtcccagctacttcagaggctgaggcacgagaatcgcttcaacccgggaggcagaggttgcagtgagctgagattgcaccattgcactccagcctgggcgacagagtgagactctgtctcaaaaaaaaaaaaagttaaataaattaagatgtgttcatatactagaatgttatgcagctgtgatgaagaatgaaagtaagaacactgttttgcattgatatggaaaggtatctaagatattgccatgtgaaaagaaaaagatgaacaactatacacagggtgtgcatttttttgtagcaaagaaagaaaaagaaaatatataatttgtgtttgttagtgtctgcatgaatcatttctaaaatgaagccaatgataagagtgggaattagcagaaacagtacatacgggtaaagatggaagagagtttctttgtatatcacttttgttttattttgtttgagacggagtctcacacggtcgcccaggctggagtgcagtggtgcgatcttggctcactgcaagctccgcctcccgggttcacgccattctcctgcctcagcctcccgagtagctgggactacaggcgcccaccaccacgcctggctaattttttgtatttttagtagagacggggtttcactgtgttagccaggatggtctcgatctcctgacctcatgatctgcctgcctcgccttccaaagtgctgggattacaggcgtgagccaccgctccggccatgttttgttttgtttttgagacagggtcttgctctgtcgcccagaatggagtgcagtggcatgatctcagctcattgcaacctcctgggttcaagtgatcttctcacttcagccgccaagtacctgggactacaggcgtaaagccaccacgcccaactaattttcctattttttgtagagatagggtttcgccatgttggtcaggctggtctcaaactcctcagctcaagccatctgcctgcctcggcctcccaaagtgctgggattacagacatgagccattgtgctcggctgtataccattttttaaatcgtgtgaatatatttctattcaaaaattaaatatgcacaaaatctaactaggtgttgatttaagaaaagcaagtcttactacaatcatattgacattcgttcaaaaagttaattgcagccaagagtggtggctcaagcctgtaatcccagcactttgagaggtgaaggtgggaggatcatttgaggccaggagttcaagaccgacctctgcaacatagcaagaccctgtctctataaaaaaatttaaaagtatctgggcatggtgacacatgcttgtagtcccagtaactctcaggaggctgaggcaggaggatcccttgagcccaggagtttgagcctgcagtgagctatgattgtgtcactgtactccagcctgggccacagtgtgagaccctgtctctaaaacataaaaaatcctttaaagaaataaataggccgggcgtggtggttcacacctgtaatcccagcactttgggaggccgaggcgggcggatcatgacgtcaggagatcgagaccatcctggctaacatggcgaaaccccatctctactaaaaatacaaaaaattagccaggcgaggtggcaggcgcctgtagtcccagctgctcgggaggctgaggcaggagaatggcgtgaagccagcgggcggagcctgcagtgagcagagatcgcacccctgcactccagccggggagacagcgagactccatctcaaaagaaaaaaataaataaataaataaataagtaattgctcacaaattcattatttttacttaaaactaatctaatatatttatatggagaagtggggtcacaattatttagctagcttcttcctctcaacctttaattttaactattttaaaccttagtcagacactcttctcctacattcaccacttactaatattttgccacatttcctttattattatctacctatttagtcacacttgcacacaagcatacacgcacttttctgggtgaaattatctgagcattagttgtagacgtcatgacactttacccctaaatactgtagcatgtagctctgaagaacaaagacacattccttacacagccacaggttactgcaatcaagaaatttaactttactattgactaattagcagtctgtatttaaatttccccaattatgccctttgtatttgtttttttcctttttattttttgttttttagtttttatttttattttattttttttagacgaagtctcactccatcacccaggctggagtgcagtggcacaatctcggctcactgcaacctccacctcccaggttcaagcaatgctcctgcctcagcctcccaagtagcttggattataggcacgcaccaccaccctggctagtttttgtatttttagtagagacggggtttcaccatgttagccacactggactcaaactcctggcctcaagtgatctgcccacctcggcctcccacagtgttgggattataggcacaagccgatgcgcccggcctatacttgttttagttttgttttgttttgttttgtttttgagacagagtctctctctatcaccaggctggagtgctgagcaatctcagctcactgcaacctccaactccgtggttcagacaattctcctatctcagcctcccgaatagctgggattacaggcacatgccaccacgccgaactaatttttgtatttttagtagagacggggtttcaccatgttggccaggattgtctcgatctcctgacctcatgatccacccacttcggcctccgaaagtgctgggattacaggtgtgagccaccatgcccagcctgttttttttctgattgacagtctggtcaatgatcacattgcctttaattgttacacctctttaggctgttttaatacacagcagttcctcaaacctctcttggtcattcttgatattgacatgtttatctgggcctgttattttcagaacgtccctaaaatctggattttccaaggtgatttctcacgaccagtcttaggttaaacatttttggcaaaggtgcttataggtaatgtgccttccaccaggatgccaaatggccccattgttggcggagaagcttgattatttggttaaggttggtatctaccaggtttcttcattgtaaaccctctttcctcttggtaattaacaagtcttttaaggtgatactttgagaccacactcgtgtcttgttccaacaacatatcactcaatggttccgcatccactgataaattttgcctatatcaattacaacaaaagtttttgcaaaaagtggttttctagttttatcatttcttctacatatattaatggccattttctttttgtgtgtgaggagtaaggggcactattattataattcaaaaatatatataaatatatattttatatgtaaatatgtataaagagtatagtaatagttataaatgtataactcaaaatgtatataaatgtaaatatatatatttatatataatatatataaattatatataaatatatatatttatgtaatatataatatattatatttatatatttatattttatatttttatatataaatatataatttatgtatatattttataattatatatttatatttaatatataatatataatttatgtatatattttataattatatatttatatttaatatataatatataatatatttatttatatatttatatttaatatataatatattattttatatttaatatataatatattatatatttaaaattatataatatataatatattatatatttaaaataatatttaatatataaatatatttatatatttatataatttatatttatattatatatattatataaatatataaatatataaattatatatttctatatatcatttatacataaattaatatataaatatataatttatatatataattatataatttatataattatataaattatataattatataaattataaatttatatatatttatatgtataaatatataaatatatataaatttatacatataaaaatataaatttatatataaatatatatataaatacaaaataaataaataaatatgtatatgtatatatttggaaacagatcttgctctgtcacccaggctgaagtgcagtggcacaatcacggctcactgcaacatccaactctggggctcaagggatcctcacacctcagtctcccaaagtgctgggattacaggtgcacaccaccatgcccagcctcaaactgttttttatttaatgtgttgtcattcattactgtcataattcctcatgctcaaagtgtcccagtgggaatgcctccaagctagctcctgtgtccctcagacatattcccatcaatcgtgaggcatgtccttgcatttagaaataagacgttgcgggctcagtgtgtacatttcttgctccagatctggaatccaccattttccatgaagccttggttccttctcgtagggaatggtacttaaagaccacagtctgggcacctggggtttttatgtcttccaggccctttttacttactcattctgataaagaactggtctttgctcttcaaacatctctcaaccatttctctaccccaccttcattttcctttcctcctcctttgggcatcaaatttttgacaaaatgttggaagctctgaagactagaaactgtgaaccttaatggtacaacatttgaaatgagacaacttcatttatttcccagcactccccacccccaagttgaaatgggttgcaaccaagctattttaaggactgcttataaagaaaggagccacaggcagtagtctcacattcagatctttttctgggaagggaggggagaagaggaggaatttcatctaatacaaatatcatttgcattttaaaagtctatgtctaattgctacttacagctatagtaaaaattgatttaatacactctaattgtatggtttgaatatgtaatcagaaatgcaaagcttgatgtcttcgattttaattttcataactaaaacctctccgttcacatatttcagtagtttctgggctgaaacacattttctaattaatgatcaagatgtgtgcaatagttcaagaccttttcaggatttggaccaccctgaataatgcattttattccacatcataattatgcttgtccctttattgaactggtcattaccttggccatagggagatatcccccagagagtcagttcgtgaattattaagtggcctaagatttgcatcatcctgacaggttaaagggccaaatttacttgactatcaaacagttttagaagattaaaaaaaattacagtttgcaacaactggagctgtactcccatgttttaataaaagctctttcctcaagaacacagtctcagaacagcacaaaagtcactgcatgactctgtaagacgaaggacaagccagtaggtacctgacctgtgaaatccaaactctggccacctcaacactttcctgttcaagatcagccttggtcaacactgtatgtcaaagtacataaggtgtatcagcagccaccaaaactcaaagcaaatggttcaaccaaaaatgggaaccttctggttaactgagaagcctataggcgactctaacttaaactgcttacgtggttttaaaaaataataataatgatatttgcaaatccaagaaaaaatattgtatggttttaattgaacaaaacaaactcaaagaaccttatacggttaaataacacattcggtgcacctatataaatgatcaacttttggggggtaaataatttttgacattactatcaccatgagaatagagatattgtcagaaaaaaaagttaatgatcttgaaatggccccaaagagttttgaatgtcctgtgtagtgaaccattcaagtcacctgcactttttcttacctttgagttattttataactttataaattgttggaaactggtagtaatgaaaatgattccttgctatagatctgcaaaggaattttgtttggtggaatgtaactgattatggccctgtggatattcaccatttttgcacttatttcagtattcctggaaaaaaacaaaaaaacaaaaaaacctctttatgtgcttttttaagtattcaaggagcaactccttcccttcaggcaaaaggtaacctgcttcaagccagctctgtaaacctccgtctgccccagtccagaagctccttatcctgaagtgttcttacagctctcagctctgttatgttccttggttcacaacactttttgattctttccatatatttccttatgttttgctgttactttagtctccccaagtcaattacgaaagtccatccaccaacaaagaagtacttcacattgtcttcaatactcctatggcattctttgaaaataaactctcttgttgctgttgtgatcattgttaggggtatgaaatacagaaagtttgtgtttgcatttttcatataccttccatcaaatcaagagttatcctccacccccaaggtcagctatggttactatgaaaatcatcatcgtttaatttatttcagctcctcttcacccacatgacccccaattctgactgccacaaggattctgtaggaaagcaccacgacaccctagagaagcagagaaaacaacagatgtggatatagaacatttgaaaaatataaactgatatctctgtcaatttctgtactttttcaacagaaaaaaagacacaatcttttcgaatgttcacggtatatttacaaaggtcatcatatcctgagctacaaaatttaaaaaaaaacctaaattaatgtccaaaataacaaaatgaggtgggaggcaggactccactccagaggtggggctcagacgcaggaccagactgaggacaaagtaaaacagggaagaggtgaaagcacctctccgtaagacacgcccaccagtgtgccatgtcagtttaccattgccatggcaacgcccagaatttaccatgcctttctatggcaacaacccagaagtgccacactttttctagaaaattctgaatgacctgccccttaatttgcatgtaattaaaagtaggcgtaaatatgactgccaaactgcccctgagctgccacctccatgcactgcctagcaggcagcactgctctgctaaccgtcatgaagcactaacactaccgcctcagtaaagctgtttcttccacccctgactcactcttgaattctttcctgagggcagccacgaaccttcccacgataagctccagctttggggctctcctgccccacatagaaagcacatacccttaccagcacggaaacaaaatagcaaagtgatccagtaagccccccaaaattgaataccttgtaaactgaaaatcactctcttggtcaaactagaaatcaacaaaaatcaccacctataaatagatgacagcaagagtgatacatgtcaaatgtcagaaaaaaaatagctgtctagactgaaaaataaagccacaatattgtatagctccacccattgaaaggtagagttttttgttgttgttttgagatggagtctcgctgtgtcgcccaggctggagtgcagtggtacaatctcggcatgagtcacggtgcctggcctgaaaggtagaattttttactcagccctcgaacctgggctatcccctgacttgctctggccaacagaacctgtgggagtgacagtgcatgaattcctgagcctaacagtctctgttttgttttgttttctttcattttttgagatggagtctcactctgtcgcccaggctggagtgcagtggcgcgatctcggctcaccgcaacctccacctctcaggttcaagtgattctcctgcctcagcctcccgagtagctgggattacaggcacccaccaccattcccggctcatttttgtatttttagtagagacagggtttcaccacattggccaggctggtctcgaactcccgatcttaggtgatccacccacctcggcctcccaaagtgctgagattacaggcatgagccaccatgcccagtcaacagtctgtttttgttctctgggaatgttgtcctggcactgccacttaaggaagccagtctaacccactgaggatgagcggccaggtgaagaagaacacggggccagcacgcactgcaggacacgagtgaggcccttggactttccagcccagctggcccagcagccaaataccacgcatcaatgaccccaggtaagcagaggaaccacgcagccaacccaaaatattatcagacataaactgttgacagattaagccatacgttttagggtggtttgtcatgcagcattagttaacaaacaataactttaattgttttcattattaatcatgacttttttttttctgagacggagtttcactctgtcgcccaggctggggggcagtggcacgatctcgggtcattgccacttccacctcctgggttcaagcgattcttctgcctcagcctcccgagtagctgggactacaggcacctgccaccgggcctggctaatttttgtatttttagttagagacagggtttcaccatcttggtcaggctggtctggtcttgaactcctgacctcgtgatctgcccgtctcagcctcccaaagtgctgggattacaggcgtgagccatcatgcccagccaatcatgacatttttaacacatcacacacgcgcgcgcgcacacacacacacacacgcacgcacacacattgtagaggacatctgctgttttggcccacccaggatccaggtccctttcctctggtcacaggtcctctctggaggactgtgggtctccaggagttgggtgagactcaggtgaagtcaatcgtgatgttaagttttgaagagaaggcaagggttaaagaaagaggagaaagagagagaggtggctctacaacaatgcaggttttatgtccagaacaagatctgtggaggtgggggaccagcttaatgccagagcccactgccagttacagtctggggtaatttacaagtctggccagggagaagggggatctggacattatggcttgctgcccaggaggatattgataaattgttgctgtgatcaggtggtttggccctttttctggtgggatgttttccacgcccgtcctggaaaacgaattgttttaatgccatttaaattaggatcaaagaggccaggcacggtggctcacgcctgtaatcccagcactttgggaggccgaggtgggtggatcacgaggtcaggagatggagaccatcctggctaatatggtgaaaccctgtctctactaaaaatacaaaaaattagccaggcgtggtggcaggcacctgtagtcccagctactcgggaggctgaggcaggagaatggtgtgaacccgagaggtggagcttgcactgagcagagatcacgccactgcactccagcctgggagacagagcgagactccatctcaaaaaaaaaaaaaaaaattataatcaaagataatctgtaggccagatgcagtggctcatgcctataatcccagtagtttgggaggccaaggcaggaggatcatttgaggccaggagttcaaaactagcctgggcaacatagtgagaccccgtctctacaaaaaatgaaaaaattagctgggtgtggtgatgcacacctgtagtcccagctacttaggaagctgagttgggaggattgcttgagcccaggagttcagaggctgcagtgagctgtgattgcaccactgcactccagcctgggagaagagcaagaccctgcctctatacagaaatttaattagataaacttacaactaaatatattaaaaacaaacataaacataagaaatactcagatcttcttttccccatatccaccatattttgactttgaggttacttgcagctattgtgtctgtacggtagaaacactataaaatggtgccatctcttcctagatccacattaggtgacttcatgttgtagctgaaaatctgccttggtgggagttttggaaattgataaacgctacaatcaggcttgaaaatatttttttaattgcatagatctctgtaatcatagcattttgggaggcagaggcgggcggattgtctgagctcaggagtttgagaccagccgggcaacatggtgaaacccgtctctactaaaatataaaatattagctggatatggcggcgcacgcctgtagtcccagcttccggaggctgaggcaggagaattgcttgaacctgggaggtggaggttgcagtgagctgagattgggccactgcactccagcctgggtgacagagcgagacttcgtccccccacctaaaaaaaaaaaaaattgcttggatctaagaaagcggtgggaaaaactgttaatgccaattaaacttaaaagtgaacagtatttatagctgttacattatgcatagcacagacaactgagaaaatagtcttctgatattcaaaaattattatctgattcagcaaagaagttgcttatgtcattgacaaacaagtgatgtaccgacatatgtcttatttcactttcatcttactccttaaatagaaatagcaatcagcatttatgtcagaagtatactaattgattgcaatcattggttggctgtagatataggacttcaacaaaaatcaacgtaaaccttttgttataaccaactggctatatgaaatttacaataaagaataccgtataccatatattttattactatttataagttatataatggattcttttttttttttttttttgagacggagtttcactcttgttgctcaggctagagtgcaatggcgtggtctctgctcactgcaacctccgcctcccgggttcaagcgattctcctgcctcagcctcccaagtagctgggattacaggcgtgagccactatgcccggcctaatgcattctttagcatcagtaaaatttataaaatgttgatatattaaataatacttctctacccaggtccagaaaaaaaggtaaaagccaaaaataattagataaataaatgttaaatatacaacattttttccagtctcctgataaatatttaccagcatccagcatactaagtgggcacaaggcaaccttttgggtgatggaaatgatctgtatattgactggactgatggtttcatggtatatacatttgttaaaattcattgaactatgcatttaaaatgtatgcattttattatatgtaaattatacctcagtaaatttgatttttttaaaaaacataaaattggccaggtgcggtggctcacgcctgtaatcctagcactttgggaggccgaggcgggtggatcacaaggtcagcagttcgagatcggcctgaccaacatactgaaaccgcctctctactaaaaacacaaaaattagccaggcgtgggggcaggcgcttgtaaccccagctactcaggaggctgaggcaggagaatctcttgaactcgggaggcggaggttgcagtggccaagatcacaccactgcactccagcctgggcgacaaagcaagactctgtctcaaaaaacaagaacaaaaacaaaaaaacaaacacgagaaaacgacaaccaaaaaaacataaaagtagggtcaaaggataagatgatgaagactccaattccacagtactttaaaaattatttggggtccaggcatgtggctcacgcctgtaaccccagcactttgggaggctgaggcgggcagatcgcttgagtttaagagtttcaagaccagcctggacaacatggtgaaaccccatgttgaaaccccatgtctaccaaaagtacaaaaattagccgggcacggtctcacgagcctgtaatcccagctactcaggaggctgaggcagaagaatcacttgaacctgggaggcagaggttgcagtgaaccaagatcgtgccactgcactccagcctgggcgacccagcgggactctgactcaaaaaaaaaggcggagggtgggggattacagtattttgtttgtttgtgtatttattttgaacttcatttaagcctagagaaggcaaaagtcacagacgcctccccgacaacccgccagctccacagccgacgcatggctgaagctctgggccctcagtcctggcaccagcatgcctctgtctctcatcttctgcagatacccaggagagctttcctctgttaaaataacagctgagattaatagcttttgcagtaattattggtgacagtaaaggaaatgtgtgatttgcactttttttttttttttggagacaggatctcactgtgtcacctaggcaagagtgcagtgacgcaaccatggctcactgcagcctcgacctcccagcgctcaagggatcctcctgcctcagcctcccaagtagctgagattacaggtgtgcaccaccatgcccagataatttttgtattttatttattttgtagagacagggtcttgcactgtcacccaggctggaatgtagtggcgcaaccactgctcactgcagctttgacctccccaagctcaagccatcttcccacctcagcccctccgaatagctgggattgactacaggcatgcaccaccatgcctggctaatttttgtattttttatttacttagttttttctgtagagacagtggtcccactatgttgcccaggctggtcttgaactcctgggctcaagcgatcctcctacctcatcctcccaaagtgctgggaccacaggcatgagccatcgcacctggcctgaatttgtgcttttaaaagcctctctaagtatttggtgaattttccacagagatgtccttctgcccttagctcttctgtgcaggaggtgaacaggaatgagcccattcactctggaggcatgtctttgccactgtctgagaacaaaagccaagtctgaaagttaaagtcacaaatatagagggaaagtcacatatctggacattgtgtcttaatgaagatcagcattcagggagcacttggaaacattaaaacctttattttttcatccagatatgttacaatatgttataatatgttacaatcacatcattctctttatatatgtacacgtctgtatatgatatatatgtcataatcatattgacctatatgatatatatcatatatacacgctttcatagcaagacaaatgcttaaggacaaattggttttacttatttttgtgaattaaaatcctaccactagacttgcctttagcaccctaagccaagtggcttatcagttatcagttaacaccagttaccaatcagcaggcacttatggagtagtgactacgtgtttataacgcccgcctttctgtaaagatgggcatttattgctttgtgtttctttaattgatgtaattaatcccggctcattgtttccaacctattcctcttcttggcccagctgaggaagtattaagttggtacaaaacc
